(19) United States
(12) Patent Application Publication
(10) Pub. No.: US 2022/0154136 A1
(43) Pub. Date: May 19, 2022

(54) IMMUNOSTIMULATORY BACTERIA DELIVERY PLATFORMS AND THEIR USE FOR DELIVERY OF THERAPEUTIC PRODUCTS

(71) Applicant: ACTYM THERAPEUTICS, INC., Berkeley, CA (US)

(72) Inventors: Christopher D. THANOS, Tiburon, CA (US); Laura Hix GLICKMAN, Oakland, CA (US); Alexandre Charles Michel IANNELLO, Oakland, CA (US); Chris RAE, Richmond, CA (US); Haixing KEHOE, Berkeley, CA (US); Bret Nicholas PETERSON, Oakland, CA (US)

(21) Appl. No.: 17/590,700

(22) Filed: Feb. 1, 2022

Related U.S. Application Data
(63) Continuation of application No. 17/320,200, filed on May 13, 2021.
Application No. 17/320,200 is a continuation-in-part of application No. PCT/US2020/060307, filed on Nov. 12, 2020.
(60) Provisional application No. 62/990,404, filed on Mar. 16, 2020.
(60) Provisional application No. 62/962,162, filed on Jan. 16, 2020.
(60) Provisional application No. 62/934,503, filed on Nov. 12, 2019.

(51) Int. Cl. C12N 1/36; C07K 16/28; C07K 16/24; C12N 1/20

(52) U.S. Cl. CPC C12N 1/36; C07K 16/2827; C07K 16/248; C07K 2319/02; C12N 1/205; C07K 2319/095; C07K 2317/622; C07K 16/2818

(57) ABSTRACT

Provided are modified STING proteins that have constitutive activity, and also can have lower NF-κB signaling activity compared to unmodified human STING. Combinations and compositions containing the modified STING proteins with immunostimulatory proteins also are provided. Also provided are immunostimulatory bacteria that encode the STING proteins and the combinations, where the immunostimulatory proteins are encoded as a polycistronic message. The immunostimulatory bacteria have genomes that are modified to, for example, reduce toxicity and improve the anti-tumor activity, such as by increasing accumulation in the tumor microenvironment, particularly in tumor-resident myeloid cells, improving resistance to complement inactivation, reducing immune cell death, promoting adaptive immunity, and enhancing T-cell function. The increase in colonization of phagocytic cells improves the delivery of encoded therapeutic products to the tumor micro environment and tumors, and permits, among other routes, systemic administration of the immunostimulatory bacteria.

### RELATED APPLICATIONS

[0001] This application is continuation of U.S. application Ser. No. 17/320,200, filed on May 13, 2021, entitled “IMMUNOSTIMULATORY BACTERIA DELIVERY PLATFORMS AND THEIR USE FOR DELIVERY OF THERAPEUTIC PRODUCTS,” to Applicant Actym Therapeutics, Inc., and inventors Laura Hix Glickman, Christopher D. Thanos, Alexandre Charles Michel Iannello, Chris Rae, Haixing Kehoe, Bret Nicholas Peterson, and Chingnam Cheung. U.S. application Ser. No. 17/320,200 is a continuation-in-part of International PCT Application No. PCT/US2020/060307, filed on Nov. 12, 2020, and published as WO 2021/097144 on May 20, 2021, entitled “IMMUNOSTIMULATORY BACTERIA DELIVERY PLATFORMS AND THEIR USE FOR DELIVERY OF THERAPEUTIC PRODUCTS,” to Applicant Actym Therapeutics, Inc., and inventors Christopher D. Thanos, Laura Hix Glickman, Alexandre Charles Michel Iannello, Chris Rae, Haixing Kehoe, Bret Nicholas Peterson, and Chingnam Cheung, which claims benefit of priority to U.S. Provisional Application Ser. No. 62/990,404, filed on Mar. 16, 2020, 62/962,162, filed on Jan. 16, 2020, and 62/934,503, filed on Nov. 12, 2019, each entitled “TUMOR-SPECIFIC IMMUNOSTIMULATORY BACTERIA DELIVERY PLATFORM,” and each to Applicant Actym Therapeutics, Inc., and inventors Laura Hix Glickman, Christopher D. Thanos, Alexandre Charles Michel Iannello, Chris Rae, and Haixing Kehoe.

[0002] This application, thus claims priority to U.S. application Ser. No. 17/320,200, and International PCT Application No. PCT/US2020/060307. Benefit of priority also is claimed to each of U.S. Provisional Application Ser. No. 62/990,404, filed on Mar. 16, 2020, U.S. Provisional Application Ser. No. 62/962,162, filed on Jan. 16, 2020, and U.S. Provisional Application Ser. No. 62/934,503, filed on Nov. 12, 2019, each entitled “TUMOR-SPECIFIC IMMUNOSTIMULATORY BACTERIA DELIVERY PLATFORM,” and each to Applicant Actym Therapeutics, Inc., and inventors Laura Hix Glickman, Christopher D. Thanos, Alexandre Charles Michel Iannello, Chris Rae, and Haixing Kehoe.

[0003] This application is related to co-pending International Application No. PCT/US2020/020240, filed on Feb. 27, 2020 and published as WO 2020/176809 on Sep. 3, 2020, entitled “IMMUNOSTIMULATORY BACTERIA ENGINEERED TO COLONIZE TUMORS, TUMOR-RESIDENT IMMUNE CELLS, AND THE TUMOR MICROENVIRONMENT,” to Applicant Actym Therapeutics, Inc., and inventors Christopher D. Thanos, Laura Hix Glickman, Justin Skoble, Alexandre Charles Michel Iannello, and Haixing Kehoe.

[0004] This application also is related to U.S. Provisional Application Ser. No. 62/962,140, filed on Jan. 16, 2020, entitled “IMMUNOSTIMULATORY BACTERIA ENGINEERED TO COLONIZE TUMORS, TUMOR-RESIDENT IMMUNE CELLS, AND THE TUMOR MICROENVIRONMENT,” to Applicant Actym Therapeutics, Inc., and inventors Christopher D. Thanos, Laura Hix Glickman, Justin Skoble, Alexandre Charles Michel Iannello, and Haixing Kehoe.

[0005] This application also is related to U.S. Provisional Application Ser. No. 62/934,478, filed on Nov. 12, 2019, entitled “IMMUNOSTIMULATORY BACTERIA ENGINEERED TO COLONIZE TUMORS AND THE TUMOR MICROENVIRONMENT,” to Applicant Actym Therapeutics, Inc., and inventors Christopher D. Thanos, Laura Hix Glickman, Justin Skoble, and Alexandre Charles Michel Iannello.

[0006] This application also is related to International Application No. PCT/US2018/041713, filed on Jul. 11, 2018 and published as WO 2019/014398 on Jan. 17, 2019, and to U.S. patent application Ser. No. 16/033,187, filed on Jul. 11, 2018 and published as U.S. Publication No. 2019/0017050 A1 on Jan. 17, 2019, each entitled “ENGINEERED IMMUNOSTIMULATORY BACTERIAL STRAINS AND USES THEREOF,” and each of which claims priority to U.S. Provisional Application Ser. No. 62/531,327, filed on Jul. 11, 2017, and 62/648,380, filed on Mar. 26, 2018. Where permitted, the subject matter of each of these applications is incorporated by reference in its entirety.

[0007] This application also is related to International Application No. PCT/US2019/041489, filed on Jul. 11, 2019, and published as WO 2020/014543 on Jan. 16, 2020, and to co-pending U.S. patent application Ser. No. 16/520,155, filed on Jul. 23, 2019, each entitled “ENGINEERED IMMUNOSTIMULATORY BACTERIAL STRAINS AND USES THEREOF,” and each of which claims priority to U.S. Provisional Application Ser. No. 62/789,983, filed on Jan. 8, 2019, and to U.S. Provisional Application Ser. No. 62/828,990, filed on Apr. 3, 2019.

[0008] This application also is related to U.S. Provisional Application Ser. No. 62/811,521, filed on Feb. 27, 2019, and 62/828,990, filed on Apr. 3, 2019.

[0009] Where permitted, the subject matter of each of these applications is incorporated by reference in its entirety. The immunostimulatory bacteria provided in each of these applications can be modified as described in this application, and such bacteria are incorporated by reference herein.

### INCORPORATION BY REFERENCE OF SEQUENCE LISTING PROVIDED ELECTRONICALLY

[0010] An electronic version of the Sequence Listing is filed herewith, the contents of which are incorporated by reference in their entirety. The electronic file was created on Jan. 31, 2022, is 705 kilobytes in size, and is titled 1707BSEQ001. txt.

### FIELD OF THE INVENTION

[0011] Provided are attenuated immunostimulatory bacteria with genomes that are modified to, for example, reduce toxicity and improve the anti-tumor activity, such as by increasing accumulation in the tumor microenvironment, particularly in tumor-resident myeloid cells, by improving resistance to complement inactivation, by reducing immune cell death, by promoting adaptive immunity, and by enhancing T-cell function. The increase in colonization of phagocytic cells improves the delivery of encoded therapeutic products to the tumor microenvironment and to tumors, and permits, among other routes, systemic administration of the immunostimulatory bacteria. The bacteria contain plasmids that encode therapeutic products, including immunostimulatory and immunomodulatory products, and particularly, complementary combinations of products that result in an anti-tumor response.

### BACKGROUND

[0012] The field of cancer immunotherapy has made great strides, as evidenced by the clinical successes of anti-CTLA-4, anti-PD-1 and anti-PD-L1 immune checkpoint antibodies (see, e.g., Buchbinder et al. (2015) J. Clin. Invest. 125:3377-3383; Hodi et al. (2010) N. Engl. J. Med. 363(8):711-723; and Chen et al. (2015) J. Clin. Invest. 125:3384-3391). Tumors have evolved a profoundly immunosuppressive environment. They initiate multiple mechanisms to evade immune surveillance, reprogram anti-tumor immune cells to suppress immunity, and continually mutate resistance to the latest cancer therapies (see, e.g., Mahoney et al. (2015) Nat. Rev. Drug Discov. 14(8):561-584). Designing immunotherapies and cancer therapies that overcome immune tolerance and escape, while limiting the autoimmune-related toxicities of current immunotherapies, challenges the field of immuno-oncology. Hence, additional and innovative immunotherapies and other therapies are needed.

### SUMMARY

[0013] Provided are immunostimulatory bacteria that contain genome modifications, and a plasmid that encodes one or more therapeutic products, such as anti-cancer therapeutics or associated treatments. The genome modifications result in immunostimulatory bacteria that accumulate in the tumor microenvironment and in tumor-resident immune cells, where they express the encoded therapeutic products. The immunostimulatory bacteria provided herein encode one or a plurality of complementary products that stimulate or induce or result in a robust anti-cancer/anti-tumor response in the subject.

[0014] Provided herein are immunostimulatory bacteria that contain a plasmid encoding a therapeutic product or combinations of therapeutic products, under control of a eukaryotic promoter. The genomes of the bacteria contain modifications, such as one, two, or more modifications, selected from among:

[0015] a) deletion or disruption or inactivation of all or of a sufficient portion of a gene or genes, whereby the bacterium has been modified to generate penta-acylated lipopolysaccharide (LPS), wherein:

[0016] the genome of the immunostimulatory bacterium is modified by deletion or disruption of all or of a sufficient portion of a gene or genes, whereby the bacterium has been modified to generate penta-acylated lipopolysaccharide; and/or

[0017] hexa-acylated lipopolysaccharide is substantially reduced, by at least 10-fold, compared to the wild-type bacterium, or is absent;

[0018] b) deletion or disruption or inactivation of all or of a sufficient portion of a gene or genes, whereby the bacterium has attenuated recognition by Toll-like Receptors (TLRs): TLR2, TLR4, and TLR5;

[0019] c) deletion or disruption or inactivation of all or of a sufficient portion of a gene or genes, whereby the bacterium does not activate the synthesis of curli fimbriae and/or cellulose;

[0020] d) deletion or disruption or inactivation of all or of a sufficient portion of a gene or genes, whereby the bacterium does not activate the synthesis of secreted asparaginase;

[0021] e) deletion or disruption or inactivation of all or of a sufficient portion of a gene or genes, whereby the bacterium is auxotrophic for purines, adenosine, or ATP;

[0022] f) deletion or disruption or inactivation of all or of a sufficient portion of a gene or genes, whereby the bacterium lacks flagella;

[0023] g) deletion or disruption or inactivation of all or of a sufficient portion of a gene or genes, whereby the bacterium has been modified to specifically infect tumor-resident myeloid cells;

[0024] h) deletion or disruption or inactivation of all or of a sufficient portion of a gene or genes, whereby the bacterium has been modified to specifically infect tumor-resident myeloid cells, and is unable to replicate in tumor-resident myeloid cells; and

[0025] i) deletion or disruption or inactivation of either or both of lppA and lppB, to decrease or eliminate lipoprotein expression in the membrane, whereby expression of an encoded therapeutic protein is increased in the tumor microenvironment and/or in tumor-resident immune cells.

[0026] For example, the immunostimulatory bacteria contain modifications, including deletions, insertions, and replacements, of a), d), and f), or modifications c) and d), or modifications a), c), d), e), and f), or modifications a), c), d), e), f), and i), or modifications a), d), f), and i), or modifications c), d), and i), or modifications f) and i), or modifications a)-i), or modifications a), b), d), and f), or modifications a), b), c), and d), and other combinations of a)-i).

[0027] In particular, provided are immunostimulatory bacteria whose genomes are modified by deletion or disruption, including by insertion, of all or of a sufficient portion of a gene or genes, whereby the bacteria have attenuated recognition by Toll-like receptor 2 (TLR2), TLR4, and TLR5. Such bacteria have low toxicity and accumulate in/colonize the tumor microenvironment and tumor-resident myeloid cells, such as macrophages. These bacteria contain plasmids that encode therapeutic products, particularly combinations of complementary products, such as a cytokine and a modified STING protein, including gain-of-function (GOF) STING proteins, STING chimeras, and chimeric STING proteins that include gain-of-function mutations. The cytokines include, for example, IL-15Rα-IL-15sc (also referred to herein as IL-15/IL-15R alpha chain complex, or IL-15/IL-15Rα), or IL-15, or IL-12, or other anti-tumor immune stimulating cytokines or chemokines. The bacteria can additionally encode other products, such as anti-tumor antibodies, and/or co-stimulatory molecules, and/or other products as described herein. Combinations of products are described and provided herein. The combinations of products that stimulate or promote an anti-tumor response and/or deliver a therapeutic product, are described throughout the disclosure herein, and they are delivered by the bacteria whose genomes are modified so that the bacteria have low toxicity and effectively colonize tumors, the tumor microenvironment, and/or tumor-resident immune cells, such as macrophages. Exemplary of such bacteria are those of species such as Salmonella, Listeria, and E. coli, that are modified so that they do not have flagella, and so that they produce lipopolysaccharide (LPS) with penta-acylated lipid A, such as by rendering the bacteria msbB⁻/pagP⁻. The bacteria additionally can be modified by elimination of curli fimbriae, and/or have reduced or eliminated cellulose production and/or biofilm formation, such as by modifying the bacteria so that they are csgD⁻. It is shown herein that bacteria with these modifications have low or no maximum tolerated dose (MTD), and high tumor colonization. It is also shown that they effectively deliver a payload or payloads, such as the immunostimulatory protein combinations.

[0028] In all embodiments, the immunostimulatory bacteria also can comprise or further comprise deletion of or disruption of the genes encoding the flagella, whereby the bacterium lacks flagella. This can be achieved by modification of genes, such as fliC⁻/fljB⁻ in Salmonella, so that the resulting bacterium does not produce flagella, where the wild-type bacterium has flagella. The immunostimulatory bacteria can be auxotrophic for purines, such as auxotrophic for adenosine, or auxotrophic for adenosine, adenine, and/or ATP. The immunostimulatory bacteria also can be purI⁻. The immunostimulatory bacteria also can be pagP⁻. The immunostimulatory bacteria also can be asd⁻ (aspartate-semialdehyde dehydrogenase⁻), such as where the bacterium is asd⁻ by virtue of disruption or deletion of all or a portion of the endogenous gene encoding aspartate-semialdehyde dehydrogenase (asd), whereby endogenous asd is not expressed. The bacteria can encode aspartate-semialdehyde dehydrogenase (asd) on the plasmid under control of a bacterial promoter. The immunostimulatory bacteria also can be msbB⁻, or can be pagP⁻/msbB⁻. For example, the immunostimulatory bacteria can be asd⁻, purI⁻, msbB⁻, flagellin⁻ (fliC⁻/fljB⁻), and pagP⁻, or they can be asd⁻, csgD⁻, purI⁻, msbB⁻, flagellin⁻, such as fliC⁻/fljB⁻, and pagP⁻. In some embodiments, the immunostimulatory bacteria are ansB⁻, asd⁻, csgD⁻, purI⁻, msbB⁻, flagellin⁻ (fliC⁻/fljB⁻), and pagP⁻. These combinations of genome modifications minimize TLR2, TLR4, and TLR5 signaling, so that the bacteria are well-tolerated. As exemplified herein, complete deletion of the purI gene, and/or complete deletion of the msbB gene, improves the bacteria compared to the prior art bacterium, designated VNP20009, in which these genes are partially deleted or interrupted.

[0029] Provided are immunostimulatory bacteria that contain a plasmid encoding a therapeutic product under control of a eukaryotic promoter, or that encode a plurality of products under control of a plurality of eukaryotic promoters, or under control of a single promoter. The genome of the immunostimulatory bacteria is modified by deletion of a sufficient portion of a gene or genes, or by the disruption of a gene or genes, whereby the bacterium is one or more of ansB⁻, asd⁻, csgD⁻, purI⁻, msbB⁻, flagellin⁻ (such as fliC⁻/fljB⁻), and pagP⁻. The immunostimulatory bacteria provided herein also include those that have the genes lppA (lpp1) and/or lppB (lpp2), which encode major outer membrane lipoproteins Lpp1 (LppA) and Lpp2 (LppB), respectively, deleted or disrupted, to eliminate or substantially reduce expression of the encoded lipoprotein(s). In particular, the immunostimulatory bacteria are lppA⁻ and lppB⁻. Provided are immunostimulatory bacteria that contain a plasmid encoding an anti-cancer therapeutic under control of eukaryotic regulatory sequences, and that are lppA⁻ and lppB⁻. For example, the immunostimulatory bacteria can be ansB⁻, asd⁻, csgD⁻, purI⁻, msbB⁻, flagellin⁻ (such as fliC⁻/fljB⁻), pagP⁻, lppA⁻, and lppB⁻.

[0030] In embodiments herein, the therapeutic product is an anti-cancer therapeutic or a therapeutic used in cancer therapy. The encoded product(s) can be operably linked to nucleic acid encoding a secretion signal, whereby, when expressed, the therapeutic product is secreted, such as secreted from a tumor-resident immune cell.

[0031] Any of the immunostimulatory bacteria also can have one or more genes or operons involved in Salmonella pathogenicity island 1 (SPI-1) invasion deleted or inactivated, whereby the immunostimulatory bacteria do not invade or infect epithelial cells. For example, the one or more genes/operons are selected from among avrA, hilA, hilD, invA, invB, invC, invE, invF, invG, invH, invI, invJ, iacP, iagB, spaO, spaQ, spaR, spaS, orgA, orgB, orgC, prgH, prgI, prgJ, prgK, sicA, sicP, sipA, sipB, sipC, sipD, sirC, sopB, sopD, sopE, sopE2, sprB, and sptP. One or more of the genes selected from among pagN, hlyE, pefI, srgD, srgA, srgB, and srgC also can be deleted, disrupted or inactivated.

[0032] The immunostimulatory bacteria include those in which one or more genes or operons involved in SPI-1 invasion or SPI-1 independent invasion are deleted, disrupted, or inactivated, whereby the immunostimulatory bacterium does not invade or infect epithelial cells, or has a reduced ability to invade or infect epithelial cells. Also included are immunostimulatory bacteria with one or more deletions or disruptions or a gene or genes encoding a protein in the SPI-2 complex.

[0033] The plasmid in the immunostimulatory bacteria can be present in low copy number or medium copy number. The plasmid can contain a medium-to-low copy number origin of replication, such as a low copy number origin of replication. In some embodiments, the plasmid is present in higher or high copy number, such as, for example, greater than 150 copies. Generally, medium copy number is less than 150 or less than about 150, and more than 20 or about 20, or is between 20 or 25 and 150; and low copy number is less than 25, or less than 20, or less than about 25, or less than about 20 copies. In particular, low to medium copy number is less than about 150 copies, or less than 150 copies; low copy number is less than about 25 copies, or less than 25 copies.

[0034] Provided are nucleic acid constructs, which are nucleic acid molecules that encode products, such as proteins, that are designed to be introduced into a cell or into a plasmid for expression of the encoded product. The constructs contain nucleic acid encoding a plurality of therapeutic products, including anti-cancer products, as a polycistronic sequence under control of a single promoter. The promoter can be a eukaryotic promoter. Other eukaryote regulatory sequences, such as enhancers, and nucleic acid encoding protein trafficking signals, such as secretion signals, and other regulatory sequences, such as terminators, including bacterial terminators to prevent read-through from bacterial promoters on the constructs, and particular configurations of elements and the order of the product-encoding nucleic acid open reading frames and/or genes, are provided and described herein. In the constructs, the polycistronic sequence can include signals or encoded signals, such as peptides, that result in expression of discrete products encoded by the polycistronic construct. Exemplary of such peptides are the 2A family of viral peptides. The constructs include such peptides or other signals between each open reading frame encoding each product. The 2A peptides include one or more of T2A, P2A, E2A, or F2A.

[0035] Provided herein are nucleic acid constructs, comprising nucleic acid encoding a plurality of anti-cancer products, such as proteins, as a polycistronic sequence under control of a single promoter, where the polycistronic sequence comprises a 2A peptide between each open reading frame (ORF) encoding each product.

[0036] The encoded therapeutic product can be a nucleic acid or a protein. Included among the therapeutic anti-cancer products are any that are used for treatment of cancer or to promote or aid or stimulate or help an anti-cancer response in a subject. Generally the anti-cancer products are proteins. The encoded products include one or more immunostimulatory protein(s) that confer(s) or contribute(s) to an anti-tumor immune response in a tumor microenvironment. Exemplary encoded products is/are immunostimulatory protein(s) that confer(s) or contribute(s) to an anti-tumor immune response in the tumor microenvironment, such as, for example, any selected from among one or more of: IL-2, IL-7, IL-12p70 (IL-12p40+IL-12p35), IL-15, IL-2 that has attenuated binding to IL-2Ra, IL-15/IL-15R alpha chain complex (also referred to as IL-15Rα-IL-15sc), IL-18, IL-21, IL-23, IL-36γ, IL-2 that is modified so that it does not bind to IL-2Ra, CXCL9, CXCL10, CXCL11, interferon-α, interferon-β, interferon-γ, CCL3, CCL4, CCL5, proteins that are involved in or that effect or potentiate recruitment and/or persistence of T-cells, co-stimulatory proteins/molecules, such as, for example, CD40, CD40 ligand (CD40L), CD28, OX40, OX40 ligand (OX40L), 4-1BB, 4-1BB ligand (4-1BBL), including forms of the co-stimulatory proteins in which the cytoplasmic domain is deleted or truncated to eliminate the immunosuppressive reverse signaling, with optional modifications to promote correct orientation (i.e., cytoplasmic domain in the cytoplasm) in a cell; members of the B7-CD28 family, CD47 antagonists, an anti-IL-6 antibodies or IL-6 binding decoy receptors, TGF-beta polypeptide antagonists, including soluble TGF-beta receptors and TGF-beta antagonists, and members of the tumor necrosis factor receptor (TNFR) superfamily.

[0037] Others of the products include an immunostimulatory protein that confers or contributes to an anti-tumor immune response in the tumor microenvironment that is selected from among one or more of: IFN-α, IFN-β, GM-CSF, IL-2, IL-7, IL-12, IL-15, IL-18, IL-21, IL-23, IL-12p70 (IL-12p40+IL-12p35), IL-15/IL-15R alpha chain complex (IL-15Rα-IL-15sc), IL-36 gamma, IL-2 that has attenuated binding to IL-2Ra, IL-2 that is modified so that it does not bind to IL-2Ra, CXCL9, CXCL10 (IP-10), CXCL11, CCL3, CCL4, CCL5, molecules involved in the potential recruitment and/or persistence of T-cells, CD40, CD40 ligand (CD40L), OX40, OX40 ligand (OX40L), 4-1BB, 4-1BB ligand (4-1BBL), 4-1BBL with a deleted cytoplasmic domain (4-1BBLΔcyt) or with a partially deleted (or truncated) cytoplasmic domain, which is deleted or truncated to eliminate the immunosuppressive reverse signaling, members of the B7-CD28 family, and members of the tumor necrosis factor receptor (TNFR) superfamily. For example, the construct can contain nucleic acid encoding 4-1BBL with a deleted, or partially deleted cytoplasmic domain, or a partially deleted cytoplasmic domain, and optionally including amino acid modifications, whereby the resulting 4-1BBL assumes the proper orientation when expressed in a cell (see, e.g., SEQ ID NOs:389-392 and the detailed description below, providing exemplary modified 4-1BBL variants with truncated cytoplasmic domains, where residues are replaced with positively charged residues (i.e., K and L), to confer proper orientation when expressed in a cell). The cytoplasmic domain is truncated sufficiently to eliminate or reduce immunosuppressive reverse signaling. Hence, provided are constructs containing nucleic acid encoding a 4-1BBL with a deleted or partially deleted cytoplasmic domain, or a modified 4-1BBL with a truncated and modified cytoplasmic domain, wherein the sequence of 4-1BBL is set forth in SEQ ID NOs:389-392, and exemplified sequences below in the detailed description and Examples. In certain embodiments, the 4-1BBL is full-length, or is full-length with amino acid replacements at Ser5, and/or Ser8, whereby immunosuppressive reverse signaling is reduced or eliminated, or is 4-1BBL with a deleted cytoplasmic domain, or a truncated cytoplasmic domain that eliminates or reduces immunosuppressive reverse signaling, or is 4-1BBL that has amino acid replacements in the truncated cytoplasmic domain, whereby the 4-1BBL is in the correct orientation when expressed in a cell.

[0038] Constructs also can contain nucleic acid encoding any of the following products and combinations of products:

[0039] one or more of IL-12, or IL-15, or IL12p70, or IL-15/IL-15R alpha chain complex;

[0040] a cytokine and a Stimulator of Interferon Genes (STING) pathway agonist;

[0041] a cytokine, a STING pathway agonist, and either a co-stimulatory molecule or an immune checkpoint inhibitor;

[0042] a cytokine, a STING pathway agonist, and a TGF-beta polypeptide antagonist;

[0043] a cytokine, a STING pathway agonist, a TGF-beta polypeptide antagonist, and either a co-stimulatory molecule (receptor or ligand) or an immune checkpoint inhibitor,

[0044] wherein a STING pathway agonist is any product that increases type I interferon expression via activation of the STING pathway. Exemplary are constructs that encode a Stimulator of Interferon Genes (STING) polypeptide, or a variant thereof or chimera thereof, as described in detail herein. Among the constructs are those that encode a combination of therapeutic products, selected from among the following combinations:

[0045] an anti-CTLA-4 antibody and a STING polypeptide,

[0046] IL-15 and a STING polypeptide,

[0047] 4-1BBL and a STING polypeptide,

[0048] a TGF-beta decoy receptor or polypeptide antagonist, and a STING polypeptide,

[0049] IL-12 and a STING polypeptide,

[0050] an anti-CTLA-4 antibody, IL-15, and a STING polypeptide,

[0051] 4-1BBL, IL-15, and a STING polypeptide,

[0052] a TGF-beta decoy receptor or polypeptide antagonist, IL-15, and a STING polypeptide,

[0053] an anti-CTLA-4 antibody, IL-12, and a STING polypeptide,

[0054] 4-1BBL, IL-12, and a STING polypeptide,

[0055] a TGF-beta decoy receptor or polypeptide antagonist, IL-12, and a STING polypeptide,

[0056] an anti-CTLA-4 antibody, IL-15, a TGF-beta decoy receptor or polypeptide antagonist, and a STING polypeptide,

[0057] 4-1BBL, IL-15, a TGF-beta decoy receptor or polypeptide antagonist, and a STING polypeptide,

[0058] an anti-CTLA-4 antibody, IL-12, a TGF-beta decoy receptor or polypeptide antagonist, and a STING polypeptide,

[0059] 4-1BBL, IL-12, a TGF-beta decoy receptor or polypeptide antagonist, and a STING polypeptide,

[0060] an anti-CTLA-4 antibody, IL-12, IL-15, and a STING polypeptide,

[0061] 4-1BBL, IL-12, IL-15, and a STING polypeptide,

[0062] a TGF-beta decoy receptor or polypeptide antagonist, IL-12, IL-15, and a STING polypeptide,

[0063] a TGF-beta decoy receptor or polypeptide antagonist, IL-12, IL-15, and a STING polypeptide,

[0064] an anti-CTLA-4 antibody, IL-12, IL-15, a TGF-beta decoy receptor or polypeptide antagonist, and a STING polypeptide,

[0065] 4-1BBL, IL-12, IL-21, a TGF-beta decoy receptor or polypeptide antagonist, and a STING polypeptide,

[0066] an anti-CTLA-4 antibody, IL-12, IL-15, and a TGF-beta decoy receptor or polypeptide antagonist,

[0067] 4-1BBL, IL-12, IL-21, and a TGF-beta decoy receptor or polypeptide antagonist,

[0068] IL-12, IL-15, and a STING polypeptide,

[0069] IL-15, IL-21, and a STING polypeptide,

[0070] IL-12, IL-21, and a STING polypeptide,

[0071] an anti-CTLA-4 antibody, IL-15, IL-21, and a STING polypeptide,

[0072] an anti-CTLA-4 antibody, IL-12, IL-21, and a STING polypeptide,

[0073] 4-1BBL, IL-15, IL-21, and a STING polypeptide,

[0074] 4-1BBL, IL-12, IL-21, and a STING polypeptide,

[0075] an anti-CTLA-4 antibody, and IL-15,

[0076] an anti-CTLA-4 antibody, IL-15, and a TGF-beta decoy receptor or polypeptide antagonist,

[0077] 4-1BBL and IL-15,

[0078] 4-1BBL, IL-15, and a TGF-beta decoy receptor or polypeptide antagonist,

[0079] an anti-CTLA-4 antibody and IL-12,

[0080] an anti-CTLA-4 antibody, IL-12, and a TGF-beta decoy receptor or polypeptide antagonist,

[0081] 4-1BBL and IL-12,

[0082] 4-1BBL, IL-12, and a TGF-beta decoy receptor or polypeptide antagonist,

[0083] an anti-CTLA-4 antibody and a TGF-beta decoy receptor or polypeptide antagonist,

[0084] 4-1BBL and a TGF-beta decoy receptor or polypeptide antagonist,

[0085] IL-15 and a TGF-beta decoy receptor or polypeptide antagonist,

[0086] IL-12 and a TGF-beta decoy receptor or polypeptide antagonist,

[0087] IL-12, IL-15, and a TGF-beta decoy receptor or polypeptide antagonist, and

[0088] IL-15, and IL-21, and a TGF-decoy receptor or polypeptide antagonist, wherein:

[0089] the anti-CTLA-4 antibody is an scFv or an scFv-Fc;

[0090] a STING polypeptides include a wild-type STING, or a variant STING polypeptide, or a chimeric STING polypeptide, and a chimeric STING protein with amino acid replacements that confer, for example, a gain-of-function; and

[0091] 4-1BBL is 4-1BBL with a deleted cytoplasmic domain, 4-1BBL with a modified cytoplasmic domain, 4-1BBL with a truncated cytoplasmic domain, or 4-1BBL with a truncated and modified cytoplasmic domain.

[0092] Other constructs include those that encode a combination of therapeutic products selected from among:

[0093] IL-2 and IL-12p70;

[0094] IL-2 and IL-21;

[0095] IL-2, IL-12p70, and a STING gain-of-function (GOF) variant;

[0096] IL-2, IL-21, and a STING GOF variant;

[0097] IL-2, IL-12p70, a STING GOF variant, and 4-1BBL (including 4-1BBLΔcyt), where Δcyt is a deleted cytoplasmic domain;

[0098] IL-2, IL-21, a STING GOF variant, and 4-1BBL (including 4-1BBLΔcyt);

[0099] IL-15/IL-15Ra (IL-15Rα-IL-15sc), and a STING GOF variant;

[0100] IL-15/IL-15Rα, a STING GOF variant, and 4-1BBL (including 4-1BBLΔcyt);

[0101] IL-15/IL-15Ra and IL-12p70;

[0102] IL-15/IL-15Ra and IL-21;

[0103] IL-15/IL-15Rα, IL-12p70, and a STING GOF variant;

[0104] IL-15/IL-15Rα, IL-21, and a STING GOF variant;

[0105] IL-15/IL-15Rα, IL-12p70, a STING GOF variant, and 4-1BBL (including 4-1BBLΔcyt);

[0106] IL-15/IL-15Rα, IL-21, a STING GOF variant, and 4-1BBL (including 4-1BBLΔcyt);

[0107] IL-12p70 and IL-21;

[0108] IL-12p70, IL-21, and a STING GOF variant;

[0109] IL-12p70, IL-21, a STING GOF variant, and 4-1BBL (including 4-1BBLΔcyt);

[0110] IL-12p70 and a STING GOF variant;

[0111] IL-12p70, a STING GOF variant, and 4-1BBL (including 4-1BBLΔcyt);

[0112] IL-12p70 and IL-18;

[0113] IL-12p70, IL-18, and a STING GOF variant;

[0114] IL-12p70, IL-18, a STING GOF variant, and 4-1BBL (including 4-1BBLΔcyt);

[0115] a TGF-β decoy receptor or antagonist polypeptide, IL-2, and IL-12p70;

[0116] a TGF-β decoy receptor or antagonist polypeptide, IL-2, and IL-21;

[0117] a TGF-β decoy receptor or antagonist polypeptide, IL-2, IL-12p70, and a STING GOF variant;

[0118] a TGF-β decoy receptor or antagonist polypeptide, IL-2, IL-21, and a STING GOF variant;

[0119] a TGF-β decoy receptor or antagonist polypeptide, IL-2, IL-12p70, a STING GOF variant, and 4-1BBL (including 4-1BBLΔcyt);

[0120] a TGF-β decoy receptor or antagonist polypeptide, IL-2, IL-21, a STING GOF variant, and 4-1BBL (including 4-1BBLΔcyt);

[0121] a TGF-β decoy receptor or antagonist polypeptide, IL-15/IL-15Rα, and a STING GOF variant;

[0122] a TGF-β decoy receptor antagonist polypeptide, IL-15/IL-15Rα, a STING GOF variant, and 4-1BBL (including 4-1BBLΔcyt);

[0123] a TGF-β decoy receptor or antagonist polypeptide, IL-15/IL-15Rα, and IL-12p70;

[0124] a TGF-β decoy receptor or antagonist polypeptide, IL-15/IL-15Rα, and IL-21;

[0125] a TGF-β decoy receptor or antagonist polypeptide, IL-15/IL-15Rα, IL-12p70, and a STING GOF variant;

[0126] a TGF-β decoy receptor antagonist polypeptide, IL-15/IL-15Rα, IL-21, and a STING GOF variant;

[0127] a TGF-β decoy receptor or antagonist polypeptide, IL-15/IL-15Rα, IL-12p70, a STING GOF variant, and 4-1BBL (including 4-1BBLΔcyt);

[0128] a TGF-β decoy receptor or antagonist polypeptide, IL-15/IL-15Rα, IL-21, a STING GOF variant, and 4-1BBL (including 4-1BBLΔcyt);

[0129] a TGF-β decoy receptor or antagonist polypeptide, IL-12p70, and IL-21;

[0130] a TGF-β decoy receptor or antagonist polypeptide, IL-12p70, IL-21, and a STING GOF variant;

[0131] a TGF-β decoy receptor or antagonist polypeptide, IL-12p70, IL-21, a STING GOF variant, and 4-1BBL (including 4-1BBLΔcyt);

[0132] a TGF-β decoy receptor or antagonist polypeptide and IL-12p70;

[0133] a TGF-β decoy receptor or antagonist polypeptide, IL-12p70, and a STING GOF variant;

[0134] a TGF-β decoy receptor or antagonist polypeptide, IL-12p70, a STING GOF variant, and 4-1BBL (including 4-1BBLΔcyt);

[0135] a TGF-β decoy receptor or antagonist polypeptide, IL-12p70, and IL-18;

[0136] a TGF-β decoy receptor or antagonist polypeptide, IL-12p70, IL-18, and a STING GOF variant;

[0137] a TGF-β decoy receptor or antagonist polypeptide, IL-12p70, IL-18, a STING GOF variant, and 4-1BBL (including 4-1BBLΔcyt);

[0138] a TGF-β decoy receptor and a STING GOF variant;

[0139] an anti-CTLA-4 antibody, IL-2, and IL-12p70;

[0140] an anti-CTLA-4 antibody, IL-2, and IL-21;

[0141] an anti-CTLA-4 antibody, IL-2, IL-12p70, and a STING GOF variant;

[0142] an anti-CTLA-4 antibody, IL-2, IL-21, and a STING GOF variant;

[0143] an anti-CTLA-4 antibody, IL-2, IL-12p70, a STING GOF variant, and 4-1BBL (including 4-1BBLΔcyt);

[0144] an anti-CTLA-4 antibody, IL-2, IL-21, a STING GOF variant, and 4-1BBL (including 4-1BBLΔcyt);

[0145] an anti-CTLA-4 antibody, IL-15/IL-15Rα, and a STING GOF variant;

[0146] an anti-CTLA-4 antibody, IL-15/IL-15Rα, a STING GOF variant, and 4-1BBL (including 4-1BBLΔcyt);

[0147] an anti-CTLA-4 antibody, IL-15/IL-15Rα, and IL-12p70;

[0148] an anti-CTLA-4 antibody, IL-15/IL-15Rα, and IL-21;

[0149] an anti-CTLA-4 antibody, IL-15/IL-15Rα, IL-12p70, and a STING GOF variant;

[0150] an anti-CTLA-4 antibody, IL-15/IL-15Rα, IL-21, and a STING GOF variant;

[0151] an anti-CTLA-4 antibody, IL-15/IL-15Rα, IL-12p70, a STING GOF variant, and 4-1BBL (including 4-1BBLΔcyt);

[0152] an anti-CTLA-4 antibody, IL-15/IL-15Rα, IL-21, a STING GOF variant, and 4-1BBL (including 4-1BBLΔcyt);

[0153] an anti-CTLA-4 antibody, IL-12p70, and IL-21;

[0154] an anti-CTLA-4 antibody, IL-12p70, IL-21, and a STING GOF variant;

[0155] an anti-CTLA-4 antibody, IL-12p70, IL-21, a STING GOF variant, and 4-1BBL (including 4-1BBLΔcyt);

[0156] an anti-CTLA-4 antibody and IL-12p70;

[0157] an anti-CTLA-4 antibody, IL-12p70, and a STING GOF variant;

[0158] an anti-CTLA-4 antibody, IL-12p70, a STING GOF variant, and 4-1BBL (including 4-1BBLΔcyt);

[0159] an anti-CTLA-4 antibody, IL-12p70, and IL-18;

[0160] an anti-CTLA-4 antibody, IL-12p70, IL-18, and a STING GOF variant;

[0161] an anti-CTLA-4 antibody, IL-12p70, IL-18, a STING GOF variant, and 4-1BBL (including 4-1BBLΔcyt);

[0162] an anti-CTLA-4 antibody and a STING GOF variant;

[0163] a CD40 agonist, IL-2, and IL-12p70;

[0164] a CD40 agonist, IL-2, and IL-21;

[0165] a CD40 agonist, IL-2, IL-12p70, and a STING GOF variant;

[0166] a CD40 agonist, IL-2, IL-21, and a STING GOF variant;

[0167] a CD40 agonist, IL-2, IL-12p70, a STING GOF variant, and 4-1BBL (including 4-1BBLΔcyt);

[0168] a CD40 agonist, IL-2, IL-21, a STING GOF variant, and 4-1BBL (including 4-1BBLΔcyt);

[0169] a CD40 agonist, IL-15/IL-15Rα, and a STING GOF variant;

[0170] a CD40 agonist, IL-15/IL-15Rα, a STING GOF variant, and 4-1BBL (including 4-1BBLΔcyt);

[0171] a CD40 agonist, IL-15/IL-15Rα, and IL-12p70;

[0172] a CD40 agonist, IL-15/IL-15Rα, and IL-21;

[0173] a CD40 agonist, IL-15/IL-15Rα, IL-12p70, and a STING GOF variant;

[0174] a CD40 agonist, IL-15/IL-15Rα, IL-21, and a STING GOF variant;

[0175] a CD40 agonist, IL-15/IL-15Rα, IL-12p70, a STING GOF variant, and 4-1BBL (including 4-1BBLΔcyt);

[0176] a CD40 agonist, IL-15/IL-15Rα, IL-21, a STING GOF variant, and 4-1BBL (including 4-1BBLΔcyt);

[0177] a CD40 agonist, IL-12p70, and IL-21;

[0178] a CD40 agonist, IL-12p70, IL-21, and a STING GOF variant;

[0179] a CD40 agonist, IL-12p70, IL-21, a STING GOF variant, and 4-1BBL (including 4-1BBLΔcyt);

[0180] a CD40 agonist and IL-12p70;

[0181] a CD40 agonist, IL-12p70, and a STING GOF variant;

[0182] a CD40 agonist, IL-12p70, a STING GOF variant, and 4-1BBL (including 4-1BBLΔcyt);

[0183] a CD40 agonist, IL-12p70, and IL-18;

[0184] a CD40 agonist, IL-12p70, IL-18, and a STING GOF variant;

[0185] a CD40 agonist, IL-12p70, IL-18, a STING GOF variant, and 4-1BBL (including 4-1BBLΔcyt); and

[0186] a CD40 agonist and a STING GOF variant, wherein:

[0187] IL-15/IL-15Ra also is referred to herein as IL-15Rα-IL-15sc, or IL-15/IL-15R alpha chain complex, or IL-15 complex, or IL-15 cmplx;

[0188] 4-1BBL is 4-1BBL with a deleted cytoplasmic domain (4-1BBLΔcyt), 4-1BBL with a modified cytoplasmic domain, 4-1BBL with a truncated cytoplasmic domain, or 4-1BBL with a truncated and modified cytoplasmic domain; and

[0189] an anti-CTLA-4 antibody is an scFv or an scFv-Fc.

[0190] Exemplary of the STING polypeptides are those in which the STING polypeptide is modified to result in increased or constitutive expression of a type I interferon (IFN), or is a chimeric polypeptide comprising a human STING polypeptide with a C-terminal tail (CTT) from a different species that has lower NF-κB signaling activity than the NF-κB signaling activity of human STING, and where, for example: the TRAF6 binding site in the CTT optionally is deleted; and the human STING protein has the sequence set forth in any of SEQ ID NOs:305-309.

[0191] Particular combinations of encoded products include those where the encoded therapeutic proteins comprise IL-12p70 and a chimeric human STING polypeptide with a CTT from Tasmanian devil and an amino acid replacement that results in increased or constitutive expression of type I interferon, or is a STING polypeptide with an amino acid replacement that results in increased or constitutive expression of type I interferon, where a mutation that results in increased or constitutive expression of type I interferon is a gain-of-function mutation. Exemplary are STING proteins or polypeptides with replacements described in the detailed description, such as where the amino replacement in the STING polypeptide corresponds to R284G or N154S/R284G with reference, for alignment, to any of SEQ ID NOs: 305-309, which set forth human STING proteins. These constructs can additionally encode IL-15Rα-IL-15sc, and/or IL-36γ, and/or an immune checkpoint inhibitor antibody. As described herein antibodies include antigen-binding portions thereof, and any of the various forms of antibodies, such as, but not limited to, scFvs, and scFv-Fc (generally an IgG Fc), where the presence of the Fc multimerizes the resulting product so that it has two chains. The antibody or antigen-binding fragment thereof can be humanized or can be human. Immune checkpoints targeted for inhibition include, but are not limited to, CTLA-4, or PD-1, or PD-L1, and antibody forms include scFv and scFv-Fc two-chain polypeptides. Other therapeutic products include anti-VEGF, anti-VEGFR, anti-TGF, or anti-IL-6 antibodies, or fragments thereof.

[0192] The encoded product can be an antigen-binding fragment of an antibody, such as, for example, a Fab, Fab′, F(ab′)2, single-chain Fv (scFv), Fv, dsFv, nanobody, diabody fragment, a single-chain antibody, or an scFv-Fc two-chain antibody.

[0193] Exemplary combinations of encoded products also include those where the encoded therapeutic proteins comprise IL-15Rα-IL-15sc and a modified STING protein, including a STING variant with GOF mutations, or a modified human STING chimera, in which the CTT of human STING is replaced with the CTT of another species, such as Tasmanian devil, that exhibits lower NF-κB signaling activity, where the chimera also optionally includes one or more GOF mutations. Such a combination also can include an immune checkpoint inhibitor antibody, such as an anti-CTLA-4, anti-PD-1, or anti-PD-L1 antibody or antigen-binding fragments thereof, such as scFvs and scFv-Fcs.

[0194] Other combinations of products include, for example, IL-15 and a STING gain-of-function variant, including STING chimeras with a gain-of-function mutation or mutations, as provided herein. Other products that are encoded in the immunostimulatory bacteria and/or nucleic acid constructs and/or plasmids provided herein, include, but are not limited to, for example, the combination of IFNα2 and an IRF3 variant with the mutation S396D; the combination of IFNα2 and IFN-β; FLT-3L (FMS-like tyrosine kinase 3 ligand); sialidase; the IL-12p35 subunit of IL-12p70 only; or Azurin. These products or combinations can be encoded in immunostimulatory bacteria that contain genome modifications, such as, for example, modifications that result in the bacteria being msbB⁻/pagP⁻, and/or modifications that result in the bacteria not having flagella, whereby the response by toll-like receptors (TLRs) 2, 4, and 5 is reduced, compared to the immunostimulatory bacteria without the genome modifications.

[0195] In some embodiments, the product is a nucleic acid, and the nucleic acid encoding the product includes nucleic acid encoding a secretion signal whereby the product is secreted.

[0196] In some embodiments, the encoded product is one that induces tumor cell apoptosis, such as, for example, azurin, or the encoded product is cytotoxic to tumor cells.

[0197] Provided are plasmids that contain the constructs described above and throughout the disclosure herein. Plasmids include bacterial plasmids, where the construct is operatively linked to eukaryotic transcriptional regulatory sequences, including, for example, a eukaryotic promoter.

[0198] The plasmid can encode a tag that is linked to the therapeutic protein, to facilitate purification or expression thereof, such as, for example, a c-myc tag comprising the sequence MEQKLISEEDL, set forth as residues 1-11 of SEQ ID NO:392.

[0199] Provided are compositions, such as pharmaceutical compositions, that contain the mixture of anti-cancer protein products encoded by the constructs or plasmids provided herein, as the only anti-cancer proteins in the compositions. Hence, among these are provided compositions that contain complementary combinations of therapeutic proteins; the mixtures include unique combinations of agents. These include the combinations of agents provided and described herein.

[0200] Also provided are immunostimulatory bacteria that contain any of the constructs and/or plasmids described and provided herein. The constructs and plasmids can be provided in, or otherwise introduced into, any of the immunostimulatory bacteria provided herein, including any discussed above and below. The constructs and plasmids also can be introduced into suitable bacteria known in the art, such as bacteria described in publications, such as International Application Publication Nos. WO 2020/172461 and WO 2020/172462, and U.S. Pat. Nos. 10,449,237, 10,286,051, and 9,616,114.

[0201] The immunostimulatory bacteria provided herein include genome modifications, such as deletions, disruptions, and other alterations that result in inactive encoded product, such as changing the orientation of all or part of the gene, so that functional gene products are not expressed. Among the immunostimulatory bacteria provided are those that are modified so that the resulting bacteria are msbB⁻. In some embodiments, the bacteria are msbB⁻ and purI⁻, whereby the full length of at least the coding portion of the msbB and/or purI genes are/is deleted. The genome of the bacteria also can be modified so that the bacteria lack flagella. This is effected in bacteria that normally express flagella. In such bacteria, for example, the genes in Salmonella, or equivalent genes in other species to fliC and fljB, can be deleted or otherwise modified so that functional gene product is not expressed. The bacteria also can be modified so that they are adenosine auxotrophs, and/or are msbB⁻/pagP⁻. Also provided are immunostimulatory bacteria and pharmaceutical compositions containing them, where the bacteria do not express L-asparaginase II, whereby the bacteria are ansB⁻. Elimination of the encoded asparaginase activity improves or retains T-cell viability/activity.

[0202] Provided are immunostimulatory bacteria that contain a plasmid encoding a therapeutic product under control of a eukaryotic promoter, where the genome of the immunostimulatory bacterium is modified by deletion or disruption of all or of a sufficient portion of a gene or genes, whereby the bacterium does not activate the synthesis of secreted asparaginase. Exemplary of such bacteria are those in which the asparaginase is L-asparaginase II, encoded by the gene ansB.

[0203] It shown herein, that in parental strain VNP20009, which is msbB⁻ and purI⁻, the msbB and purI genes are not completely deleted. In immunostimulatory bacteria provided herein, the genome of the bacterium is modified so that the full length of at least the coding portion of the msbB and purI genes is deleted. These strains are more fit, and grow faster and/or to a greater extent than the parental strain. In all embodiments herein, the bacteria can be modified so that the native asd gene product is inactive or not expressed. To aid in producing the strain, the asd gene is encoded on a plasmid under control of a prokaryotic promoter, such as an inducible promoter.

[0204] In embodiments, the strains include modifications so that the bacteria lack flagella, and are pagP⁻, ansB⁻, and csgD⁻. In addition, the bacteria are purI⁻ and asd⁻ Thus, provided are strains, including modified parental strains, that already are msbB⁻ and purI⁻, and/or that have other modifications, particularly those that modify the LPS, that also are Δasd/ΔFLG/ΔpagP/ΔansB/ΔcsgD. The strains also can be adenosine auxotrophs, or adenosine and adenine auxotrophs.

[0205] Encoded therapeutic products include nucleic acids and proteins. The plasmid can encode two or more therapeutic products. Exemplary products include, but are not limited to, a cytokine, a protein that constitutively induces a type I interferon (IFN), and a co-stimulatory receptor or ligand. Further exemplary combinations are described below. In some embodiments, the co-stimulatory molecule lacks all or a portion of the cytoplasmic domain for expression on an antigen-presenting cell (APC), whereby the truncated molecule is capable of constitutive immuno-stimulatory signaling to a T-cell through co-stimulatory receptor engagement, and is unable to counter-regulatory signal to the antigen-presenting cell (APC), due to the deleted or truncated or otherwise modified cytoplasmic domain or portion thereof. Other products include enzymes that activate therapeutic proteins, such as those that activate prodrugs. As described herein and below, the immunostimulatory bacteria provided herein encode anti-cancer therapeutics, including combinations of therapeutic products that combine to provide a robust anti-cancer response. Among the proteins encoded are each of the products listed above and below, and combinations of products from different classes. Included are the co-stimulatory proteins, such as 4-1BBL, particularly those with truncated or deleted cytoplasmic domains to eliminate immunosuppressive reverse signaling, and also any compensatory mutations to ensure that the resulting protein is correctly oriented in the cell membrane when expressed in a cell. Other products include STING pathway agonists to induce or result in constitutive expression of type I interferons. These products include STING protein and, particularly, the modified and chimeric STING proteins provided and described herein. One or more cytokines, such as IL-12, IL-15, IL-21, IL-12p70 (IL-12p40+IL-12p35), IL-2 that has attenuated binding to IL-2Ra, IL-15/IL-15R alpha chain complex, and others, such as IL-18, IL-23, and/or IL-36γ, also are encoded on the plasmids. In addition to the co-stimulatory products, the STING pathway agonist proteins, such as STING, and the cytokines, and antibodies, such as checkpoint inhibitor antibodies, including anti-CTLA-4 antibodies, can be encoded on the plasmids. The antibodies can be scFvs, and also, scFv-Fc two-chain forms, as well as other forms. Additionally, among other products, TGF-beta antagonists and TGF-beta receptor decoys can be included.

[0206] The encoded therapeutic products can be operatively linked to nucleic acid encoding regulatory sequences recognized by a eukaryotic host, such as, for example, secretion signals to effect secretion from a cell comprising the bacterium or plasmid. In embodiments where the immunostimulatory bacteria encode two or more products, expression of each product can be under control of a separate promoter. Alternatively, two or more products can be expressed under control of a single promoter, and each product is separated by nucleic acid encoding, for example, an internal ribosomal entry site (IRES), or a 2A peptide, to effect separate expression of each encoded therapeutic product. Exemplary 2A peptides are T2A, F2A, E2A, or P2A, which can flank nucleic acids encoding the therapeutic products, to effect separate expression of the therapeutic products expressed under control of a single promoter. The therapeutic products are expressed under control of a eukaryotic promoter, such as an RNA polymerase II promoter, or an RNA polymerase III promoter. These include an RNA polymerase II promoter that is a viral promoter, or a mammalian RNA polymerase II promoter, such as, but not limited to, as a cytomegalovirus (CMV) promoter, an SV40 promoter, an Epstein-Barr virus (EBV) promoter, a herpes virus promoter, an adenovirus promoter, an elongation factor-1 (EF-1) alpha promoter, a UBC promoter, a PGK promoter, a CAGG promoter, an adenovirus 2 or 5 late promoter, an EIF4A1 promoter, a CAG promoter, or a CD68 promoter. The promoter can be a viral promoter that is a later promoter. The plasmids further can include other eukaryotic regulatory sequences, such as terminators and/or promoters selected from among SV40, human growth hormone (hGH), bovine growth hormone (BGH or bGH), MND (a synthetic promoter that contains the U3 region of a modified MoMuLV LTR with myeloproliferative sarcoma virus enhancer), chicken beta-globulin, and rbGlob (rabbit globulin) genes, to control expression of the therapeutic product(s). Other regulatory sequences include a polyA tail, a Woodchuck Hepatitis Virus (WHP) Posttranscriptional Regulatory Element (WPRE), and a Hepatitis B virus Posttranscriptional Regulatory Element (HPRE). Additional regulatory elements, such as bacterial terminators inserted in appropriate loci, as described herein, to reduce or eliminate read-through from bacterial promoters, can be included.

[0207] In embodiments herein, the plasmid that encodes the therapeutic product(s) comprises a construct that includes an enhancer, a promoter, the open reading frame(s) encoding the therapeutic product(s) or heterologous protein(s), and a polyA tail. The plasmid can comprise a construct that includes an enhancer, a promoter, an IRES (internal ribosome entry site), the open reading frame encoding the therapeutic product or heterologous protein, and a polyA tail, or can comprise a construct that includes an enhancer, a promoter, an IRES, a localization sequence, the open reading frame encoding the therapeutic product, and a polyA tail. In some embodiments, the plasmid comprises a construct that includes a bacterial terminator positioned to decrease read-through from a bacterial promoter on the plasmid, and/or the eukaryotic promoter on the plasmid is oriented in the opposite direction from a bacterial promoter on the plasmid.

[0208] The encoded therapeutic products include any described herein and in the original claims, such as nucleic acid encoding a protein that is part of a cytosolic DNA/RNA sensor pathway that leads to expression of type I interferon (IFN), or a variant thereof. Type I IFNs include interferon-α and interferon-β. Variants include those that, when expressed in a subject, lead to constitutive expression of type I IFN. These include a gain-of-function (GOF) variant that does not require cytosolic nucleic acids, nucleotides, dinucleotides, or cyclic dinucleotides to result in expression of type I IFN. The encoded therapeutic products can include a gain-of-function, constitutively active variant of a protein that, in humans, promotes or causes interferonopathies. Exemplary of these proteins is a protein selected from among STING, RIG-I, MDA-5, IRF-3, IRF-7, TRIM56, RIP1, Sec5, TRAF3, TRAF2, TRAF6, STAT1, LGP2, DDX3, DHX9, DDX1, DDX9, DDX21, DHX15, DHX33, DHX36, DDX60, and SNRNP200, and variants thereof that have increased activity, or that result in constitutive expression of type I interferon (IFN). Variants include a variant of STING, RIG-I, IRF-3, or MDA5, in which one or more serine (S) or threonine (T) residue(s) that is/are phosphorylated as a consequence of viral infection, is/are replaced with an aspartic acid (D) residue, whereby the resulting variant is a phosphomimetic that constitutively induces type I IFN, and any known to those of skill in the art and/or described herein. The therapeutic product can be a variant that comprises a mutation that eliminates a phosphorylation site in a STING protein to thereby reduce nuclear factor kappa-light-chain-enhancer of activated B-cell (NF-κB) signaling. Variants include, for example, those wherein the mutations are selected as follows: a) in STING, with reference to SEQ ID NOs: 305-309, one or more selected from among: S102P, V147L, V147M, N154S, V155M, G166E, C206Y, G207E, S102P/F279L, F279L, R281Q, R284G, R284S, R284M, R284K, R284T, R197A, D205A, R310A, R293A, T294A, E296A, R197A/D205A, S272A/Q273A, R310A/E316A, E316A, E316N, E316Q, S272A, R293A/T294A/E296A, D231A, R232A, K236A, Q273A, S358A/E360A/S366A, D231A/R232A/K236A/R238A, S358A, E360A, S366A, R238A, R375A, N154S/R284G, and S324A/S326A; b) in MDA5, with reference to SEQ ID NO:310, one or more of: T331I, T331R, A489T, R822Q, G821S, A946T, R337G, D393V, G495R, R720Q, R779H, R779C, L372F, and A452T; c) in RIG-I, with reference to SEQ ID NO:311, one or both of E373A and C268F; and d) in IRF-3, with reference to SEQ ID NO:312, S396D, or S396D/S398D/S402D/T404D/S405D, such as a variant STING that contains one or more amino replacement(s) selected, with reference to SEQ ID NOs: 305-309, from among: S102P, V147L, V147M, N154S, V155M, G166E, C206Y, G207E, S102P/F279L, F279L, R281Q, R284G, R284S, R284M, R284K, R284T, R197A, D205A, R310A, R293A, T294A, E296A, R197A/D205A, S272A/Q273A, R310A/E316A, E316A, E316N, E316Q, S272A, R293A/T294A/E296A, D231A, R232A, K236A, Q273A, S358A/E360A/S366A, D231A/R232A/K236A/R238A, S358A, E360A, S366A, R238A, R375A, N154S/R284G, and S324A/S326A, and conservative replacements thereof, and combinations thereof.

[0209] The immunostimulatory bacteria also can encode an immunostimulatory protein that confers or contributes to an anti-tumor immune response in the tumor microenvironment. These include, but are not limited to, a cytokine, a chemokine, or a co-stimulatory molecule. Exemplary of these is a protein selected from among one or more of: IL-2, IL-7, IL-12p70 (IL-12p40+IL-12p35), IL-15, IL-36 gamma, IL-2 that has attenuated binding to IL-2Ra, IL-15/IL-15R alpha chain complex, IL-18, IL-21, IL-23, IL-2 modified so that it does not bind to IL-2Ra, CXCL9, CXCL10, CXCL11, interferon-α, interferon-β, interferon-γ, CCL3, CCL4, CCL5, proteins that are involved in or that effect or potentiate the recruitment and/or persistence of T-cells, CD40, CD40 ligand (CD40L), CD28, OX40, OX40 ligand (OX40L), 4-1BB, 4-1BB ligand (4-1BBL), members of the B7-CD28 family, CD47 antagonists, an anti-IL-6 antibody or IL-6 binding decoy receptor, TGF-beta polypeptide antagonists, and members of the tumor necrosis factor receptor (TNFR) superfamily. The co-stimulatory molecule, selected from among CD40, CD40 ligand, CD28, OX40, OX40 ligand, 4-1BB, and 4-1BB ligand, can be truncated, such that the molecule lacks a cytoplasmic domain (or a portion thereof) for expression on an antigen-presenting cell (APC); and the truncated gene product is capable of constitutive immunostimulatory signaling to a T-cell through co-stimulatory receptor engagement, and is unable to counter-regulatory signal to the antigen-presenting cell (APC), due to the deleted cytoplasmic domain, or partially deleted or truncated cytoplasmic domain, to eliminate the immunosuppressive reverse signaling. Other such proteins are TGF-beta polypeptide antagonists, such as an anti-TGF-beta antibody or antibody fragment, an anti-TGF-beta receptor antibody or antibody fragment, a soluble TGF-beta antagonist polypeptide, or a TGF-beta binding decoy receptor.

[0210] The plasmids can encode a therapeutic antibody or antigen-binding fragment thereof, such as, for example, a Fab, Fab′, F(ab′)₂, single-chain Fv (scFv), scFv-Fc, Fv, dsFv, nanobody, diabody fragment, or a single-chain antibody. Examples include, but are not limited to, an antagonist of PD-1, PD-L1, CTLA-4, VEGF, VEGFR2, or IL-6.

[0211] In some embodiments, the immunostimulatory bacteria provided herein contain a plasmid that encodes two or more therapeutic proteins selected from among: a) an immunostimulatory protein that confers or contributes to an anti-tumor immune response in the tumor microenvironment; b) one or more of a protein that is part of a cytosolic DNA/RNA sensor pathway that leads to expression of type I interferon (IFN), or a variant thereof that has increased activity to increase expression of type I IFN, or a variant thereof that results in constitutive expression of a type I IFN; and c) an anti-cancer antibody or antigen-binding portion thereof. For example, the immunostimulatory protein can be a co-stimulatory molecule that is one that lacks a cytoplasmic domain or a sufficient portion thereof, for expression on an antigen-presenting cell (APC), whereby the truncated co-stimulatory molecule is capable of constitutive immunostimulatory signaling to a T-cell through co-stimulatory receptor engagement, and is unable to counter-regulatory signal to the antigen-presenting cell (APC). In some embodiments, the immunostimulatory bacteria encode at least two therapeutic products selected from among a cytokine, a protein that constitutively induces a type I IFN, a co-stimulatory molecule, and an anti-cancer antibody or antigen-binding portion thereof, which can be under control of a single promoter. For example, expression of the nucleic acid encoding at least two or all of the products is under control of a single promoter, and the nucleic acid encoding each product is separated by nucleic acid encoding 2A polypeptides, whereby, upon translation, each product is separately expressed. The nucleic acid encoding each product can be operatively linked to nucleic acid encoding a sequence that directs secretion of the expressed product from a cell.

[0212] Provided are immunostimulatory bacteria that encode two or more therapeutic products, wherein at least one product is selected from a), and at least one is selected from b), and a) is IL-2, IL-7, IL-12p70 (IL-12p40+IL-12p35), IL-15, IL-23, IL-36 gamma, IL-2 that has attenuated binding to IL-2Ra, IL-15/IL-15R alpha chain complex (also referred to herein as IL-15Rα-IL-15sc, IL-15/IL-15Rα, IL-15/IL-15Ra complex, IL-15 complex, IL-15 cmplx, and variations thereof), IL-18, IL-2 modified so that it does not bind to IL-2Ra, CXCL9, CXCL10, CXCL11, interferon-α, interferon-β, CCL3, CCL4, CCL5, proteins that are involved in or that effect or potentiate the recruitment and/or persistence of T cells, CD40, CD40 Ligand (CD40L), OX40, OX40 Ligand (OX40L), 4-1BB, 4-1BB Ligand (4-1BBL), members of the B7-CD28 family, TGF-beta polypeptide antagonists, or members of the tumor necrosis factor receptor (TNFR) superfamily; and b) is STING, RIG-I, MDA-5, IRF-3, IRF-5, IRF-7, TRIM56, RIP1, Sec5, TRAF3, TRAF2, TRAF6, STAT1, LGP2, DDX3, DHX9, DDX1, DDX9, DDX21, DHX15, DHX33, DHX36, DDX60, or SNRNP200. They also can encode one or more of a TGF-beta inhibitory antibody, a TGF-beta binding decoy receptor, an anti-IL-6 antibody, and an IL-6 binding decoy receptor.

[0213] Exemplary of combinations of encoded therapeutic products are any of the following combinations of therapeutic products: IL-2 and IL-12p70; IL-2 and IL-21; IL-2, IL-12p70, and a STING GOF variant; IL-2, IL-21, and a STING GOF variant; IL-2, IL-12p70, a STING GOF variant, and 4-1BBL (including 4-1BBLΔcyt, where Δcyt is a deleted cytoplasmic domain, and 4-1BBL with a truncated cytoplasmic domain (4-1BBLcyt trunc)); IL-2, IL-21, a STING GOF variant, and 4-1BBL (including 4-1BBLΔcyt, and 4-1BBL with a truncated cytoplasmic domain); IL-15/IL-15Rα, and a STING GOF variant; IL-15/IL-15Rα, a STING GOF variant, and 4-1BBL (including 4-1BBLΔcyt and 4-1BBLcyt trunc); IL-15/IL-15Ra and IL-12p70; IL-15/IL-15Ra and IL-21; IL-15/IL-15Rα, IL-12p70, and a STING GOF variant; IL-15/IL-15Rα, IL-21, and a STING GOF variant; IL-15/IL-15Rα, IL-12p70, a STING GOF variant, and 4-1BBL (including 4-1BBLΔcyt and 4-1BBLcyt trunc); IL-15/IL-15Rα, IL-21, a STING GOF variant, and 4-1BBL (including 4-1BBLΔcyt and 4-1BBLcyt trunc); IL-12p70 and IL-21; IL-12p70, IL-21, and a STING GOF variant; IL-12p70, IL-21, a STING GOF variant, and 4-1BBL (including 4-1BBLΔcyt and 4-1BBLcyt trunc); IL-12p70 and a STING GOF variant; IL-12p70, a STING GOF variant, and 4-1BBL (including 4-1BBLΔcyt and 4-1BBLcyt trunc); IL-12p70 and IL-18; IL-12p70, IL-18, and a STING GOF variant; IL-12p70, IL-18, a STING GOF variant, and 4-1BBL (including 4-1BBLΔcyt and 4-1BBLcyt trunc); a TGF-β decoy receptor, IL-2, and IL-12p70; a TGF-β decoy receptor, IL-2, and IL-21; a TGF-decoy receptor, IL-2, IL-12p70, and a STING GOF variant; a TGF-β decoy receptor, IL-2, IL-21, and a STING GOF variant; a TGF-β decoy receptor, IL-2, IL-12p70, a STING GOF variant, and 4-1BBL (including 4-1BBLΔcyt and 4-1BBLcyt trunc); a TGF-β decoy receptor, IL-2, IL-21, a STING GOF variant, and 4-1BBL (including 4-1BBLΔcyt and 4-1BBLcyt trunc); a TGF-β decoy receptor, IL-15/IL-15Ra, and a STING GOF variant; a TGF-β decoy receptor, IL-15/IL-15Rα, a STING GOF variant, and 4-1BBL (including 4-1BBLΔcyt and 4-1BBLcyt trunc); a TGF-β decoy receptor, IL-15/IL-15Rα, and IL-12p70; a TGF-β decoy receptor, IL-15/IL-15Ra, and IL-21; a TGF-β decoy receptor, IL-15/IL-15Rα, IL-12p70, and a STING GOF variant; a TGF-β decoy receptor, IL-15/IL-15Rα, IL-21, and a STING GOF variant; a TGF-β decoy receptor, IL-15/IL-15Rα, IL-12p70, a STING GOF variant, and 4-1BBL (including 4-1BBLΔcyt and 4-1BBLcyt trunc); a TGF-β decoy receptor, IL-15/IL-15Rα, IL-21, a STING GOF variant, and 4-1BBL (including 4-1BBLΔcyt and 4-1BBLcyt trunc); a TGF-β decoy receptor, IL-12p70, and IL-21; a TGF-β decoy receptor, IL-12p70, IL-21, and a STING GOF variant; a TGF-β decoy receptor, IL-12p70, IL-21, a STING GOF variant, and 4-1BBL (including 4-1BBLΔcyt and 4-1BBLcyt trunc); a TGF-β decoy receptor and IL-12p70; a TGF-β decoy receptor, IL-12p70, and a STING GOF variant; a TGF-β decoy receptor, IL-12p70, a STING GOF variant, and 4-1BBL (including 4-1BBLΔcyt and 4-1BBLcyt trunc); a TGF-β decoy receptor, IL-12p70, and IL-18; a TGF-β decoy receptor, IL-12p70, IL-18, and a STING GOF variant; a TGF-β decoy receptor, IL-12p70, IL-18, a STING GOF variant, and 4-1BBL (including 4-1BBLΔcyt and 4-1BBLcyt trunc); a TGF-β decoy receptor and a STING GOF variant; an anti-CTLA-4 antibody, IL-2, and IL-12p70; an anti-CTLA-4 antibody, IL-2, and IL-21; an anti-CTLA-4 antibody, IL-2, IL-12p70, and a STING GOF variant; an anti-CTLA-4 antibody, IL-2, IL-21, and a STING GOF variant; an anti-CTLA-4 antibody, IL-2, IL-12p70, a STING GOF variant, and 4-1BBL (including 4-1BBLΔcyt and 4-1BBLcyt trunc); an anti-CTLA-4 antibody, IL-2, IL-21, a STING GOF variant, and 4-1BBL (including 4-1BBLΔcyt); an anti-CTLA-4 antibody, IL-15/IL-15Rα, and a STING GOF variant; an anti-CTLA-4 antibody, IL-15/IL-15Rα, a STING GOF variant, and 4-1BBL (including 4-1BBLΔcyt and 4-1BBL with a truncated cytoplasmic domain); an anti-CTLA-4 antibody, IL-15/IL-15Rα, and IL-12p70; an anti-CTLA-4 antibody, IL-15/IL-15Rα, and IL-21; an anti-CTLA-4 antibody, IL-15/IL-15Rα, IL-12p70, and a STING GOF variant; an anti-CTLA-4 antibody, IL-15/IL-15Rα, IL-21, and a STING GOF variant; an anti-CTLA-4 antibody, IL-15/IL-15Rα, IL-12p70, a STING GOF variant, and 4-1BBL (including 4-1BBLΔcyt and 4-1BBLcyt trunc); an anti-CTLA-4 antibody, IL-15/IL-15Rα, IL-21, a STING GOF variant, and 4-1BBL (including 4-1BBLΔcyt and 4-1BBLcyt trunc); an anti-CTLA-4 antibody, IL-12p70, and IL-21; an anti-CTLA-4 antibody, IL-12p70, IL-21, and a STING GOF variant; an anti-CTLA-4 antibody, IL-12p70, IL-21, a STING GOF variant, and 4-1BBL (including 4-1BBLΔcyt and 4-1BBLcyt trunc); an anti-CTLA-4 antibody and IL-12p70; an anti-CTLA-4 antibody, IL-12p70, and a STING GOF variant; an anti-CTLA-4 antibody, IL-12p70, a STING GOF variant, and 4-1BBL (including 4-1BBLΔcyt and 4-1BBLcyt trunc); an anti-CTLA-4 antibody, IL-12p70, and IL-18; an anti-CTLA-4 antibody, IL-12p70, IL-18, and a STING GOF variant; an anti-CTLA-4 antibody, IL-12p70, IL-18, a STING GOF variant, and 4-1BBL (including 4-1BBLΔcyt and 4-1BBLcyt trunc); an anti-CTLA-4 antibody and a STING GOF variant; a CD40 agonist, IL-2, and IL-12p70; a CD40 agonist, IL-2 and IL-21; a CD40 agonist, IL-2, IL-12p70, and a STING GOF variant; a CD40 agonist, IL-2, IL-21, and a STING GOF variant; a CD40 agonist, IL-2, IL-12p70, a STING GOF variant, and 4-1BBL (including 4-1BBLΔcyt and 4-1BBLcyt trunc); a CD40 agonist, IL-2, IL-21, a STING GOF variant, and 4-1BBL (including 4-1BBLΔcyt and 4-1BBLcyt trunc); a CD40 agonist, IL-15/IL-15Rα, and a STING GOF variant; a CD40 agonist, IL-15/IL-15Rα, a STING GOF variant, and 4-1BBL (including 4-1BBLΔcyt and 4-1BBLcyt trunc); a CD40 agonist, IL-15/IL-15Rα, and IL-12p70; a CD40 agonist, IL-15/IL-15Rα, and IL-21; a CD40 agonist, IL-15/IL-15Rα, IL-12p70, and a STING GOF variant; a CD40 agonist, IL-15/IL-15Rα, IL-21, and a STING GOF variant; a CD40 agonist, IL-15/IL-15Rα, IL-12p70, a STING GOF variant, and 4-1BBL (including 4-1BBLΔcyt and 4-1BBLcyt trunc); a CD40 agonist, IL-15/IL-15Ra, IL-21, a STING GOF variant, and 4-1BBL (including 4-1BBLΔcyt and 4-1BBLcyt trunc); a CD40 agonist, IL-12p70, and IL-21; a CD40 agonist, IL-12p70, IL-21, and a STING GOF variant; a CD40 agonist, IL-12p70, IL-21, a STING GOF variant, and 4-1BBL (including 4-1BBLΔcyt and 4-1BBLcyt trunc); a CD40 agonist and IL-12p70; a CD40 agonist, IL-12p70, and a STING GOF variant; a CD40 agonist, IL-12p70, a STING GOF variant, and 4-1BBL (including 4-1BBLΔcyt and 4-1BBLcyt trunc); a CD40 agonist, IL-12p70, and IL-18; a CD40 agonist, IL-12p70, IL-18, and a STING GOF variant; a CD40 agonist, IL-12p70, IL-18, a STING GOF variant, and 4-1BBL (including 4-1BBLΔcyt and 4-1BBLcyt trunc); and a CD40 agonist and a STING GOF variant.

[0214] In all combinations including 4-1BBL, the 4-1BBL molecule can be a full-length protein (see, e.g., SEQ ID NOs:389 and 393, for human and mouse 4-1BBL, respectively); a 4-1BBL variant with the cytoplasmic domain deleted (4-1BBLΔcyt; see e.g., SEQ ID NOs:390 and 394, for human and murine 4-1BBLΔcyt, respectively); a 4-1BBL variant with a truncated (i.e., not fully deleted) cytoplasmic domain (4-1BBLcyt trunc; see, e.g., SEQ ID NOs:391-392 and SEQ ID NOs:395-396, for exemplary human and mouse 4-1BBLcyt trunc variants, respectively); or a 4-1BBL molecule with a modified cytoplasmic domain, in which one or more Ser residues, which act as phosphorylation sites, are replaced at an appropriate locus or loci, such as, for human 4-1BBL, with reference to SEQ ID NO:389, Ser5 and Ser8, with a residue that reduces or eliminates reverse signaling. Additionally, all combinations including an anti-CTLA-4 antibody can include an anti-CTLA-4 antibody fragment, such as an anti-CTLA-4 scFv (see, e.g., SEQ ID NOs:403 and 404, for exemplary human and mouse anti-CTLA-4 scFv fragments, respectively), or an anti-CTLA-4 scFv-Fc (see, e.g., SEQ ID NOs:402 and 405, for exemplary human and mouse anti-CTLA-4 scFv-Fc fragments, respectively).

[0215] Also provided are modified non-human Stimulator of Interferon Genes (STING) proteins, and STING protein chimeras, as well as delivery vehicles, including any described herein, pharmaceutical compositions, cells encoding or containing these STING proteins, and uses thereof, and methods of treatment of cancers. In particular, the immunostimulatory bacteria provided herein encode the modified non-human STING proteins, non-human STING proteins, and chimeras, as described herein. These STING proteins that are encoded by the immunostimulatory bacteria are provided herein and described throughout. Provided herein are:

[0216] 1. Modified non-human STING proteins, where the non-human STING protein is one that has lower NF-κB activation than the human STING protein, and, optionally, higher type I interferon activation activity compared to the wild-type (WT) human STING protein. These non-human STING proteins are modified to include a mutation or mutations so that they have increased activity, or act constitutively in the absence of cytosolic nucleic acid signaling. The mutations are typically amino acid mutations that occur in interferonopathies in humans, such as those described above for human STING. The corresponding mutations are introduced into the non-human species STING proteins, where corresponding amino acid residues are identified by alignment. Also, in some embodiments, the TRAF6 binding site in the C-terminal tail (CTT) of the STING protein is deleted, reducing NF-κB signaling activity.

[0217] 2. Modified STING proteins, particularly human STING proteins, that are chimeras, in which the CTT (C-terminal tail) region in the STING protein from one species, such as human, is replaced with the CTT from a STING protein of another species that has lower NF-κB signaling activity and/or higher type I IFN signaling activity than human STING. Also, the TRAF6 binding site is optionally deleted in these chimeras.

[0218] 3. The modified STING proteins of 2 that also include the mutations of 1.

[0219] 4. Delivery vehicles, such as immunostimulatory bacteria, any provided herein or known to those of skill in the art, including, for example, exosomes, nanoparticles, minicells, cells, liposomes, lysosomes, oncolytic viruses, and other viral vectors, that encode the modified STING proteins of any of 1-3.

[0220] 5. Delivery vehicles, such as immunostimulatory bacteria, any provided herein or known to those of skill in the art, including, for example, exosomes, nanoparticles, minicells, cells, liposomes, lysosomes, oncolytic viruses, and other viral vectors, that encode unmodified STING from a non-human species whose STING protein has reduced NF-κB signaling activity compared to that of human STING, and optionally, increased type I interferon stimulating/signaling activity compared to that of human STING.

[0221] 6. Cells (non-zygotes, if human), such as cells used for cell therapy, such as T-cells and stem cells, and cells used to produce the STING proteins of any of 1-3.

[0222] 7. Pharmaceutical compositions that contain the STING proteins of any of 1-3, or the delivery vehicles of 4 and 5, or the cells of 6.

[0223] 8. Uses and methods of treatment of cancer by administering any of 1-7, as described herein for the immunostimulatory bacteria.

[0224] Assays and methods to assess NF-κB activity (signaling activity), and type I interferon stimulating activity or interferon-β stimulating activity of STING are described herein, and also are known to those of skill in the art. Methods include those described, for example, in de Oliveira Mann et al. (2019) Cell Reports 27:1165-1175, which describes, inter alia, the interferon-β and NF-κB signaling activities of STING proteins from various species, including human, thereby identifying STING proteins from various species that have lower NF-κB activity than human STING, and those that also have comparable or higher interferon-β activity than human STING. de Oliveira Mann et al. (2019) provides species alignments and identifies domains of STING in each species, including the CTT domain (see, also, the Supplemental Information for de Oliveira Mann et al. (2019)).

[0225] The non-human STING proteins can be, but are not limited to, STING proteins from the following species: Tasmanian devil (Sarcophilus harrisii; SEQ ID NO:349), marmoset (Callithrix jacchus; SEQ ID NO:359), cattle (Bos taurus; SEQ ID NO:360), cat (Felis catus; SEQ ID NO:356), ostrich (Struthio camelus austrahlis; SEQ ID NO:361), crested ibis (Nipponia nippon; SEQ ID NO:362), coelacanth (Latimeria chalumnae; SEQ ID NOs:363-364), boar (Sus scrofa; SEQ ID NO:365), bat (Rousettus aegyptiacus; SEQ ID NO:366), manatee (Trichechus manatus latirostris; SEQ ID NO:367), ghost shark (Callorhinchus milli; SEQ ID NO:368), and mouse (Mus musculus; SEQ ID NO:369). These vertebrate STING proteins readily activate immune signaling in human cells, indicating that the molecular mechanism of STING signaling is shared in vertebrates (see, de Oliveira Mann et al. (2019) Cell Reports 27:1165-1175).

[0226] It is shown herein that the immunostimulatory bacteria provided herein, by virtue of the ability to infect myeloid cells, such as tumor-resident and tissue-resident macrophages, and to retain viability for at least a limited time, and/or that deliver plasmids that encode therapeutic products that result in expression of type I IFN and/or other immune-stimulating products, such as gain-of-function (GOF) variants that do not require cytosolic nucleic acids, nucleotides, dinucleotides, or cyclic dinucleotides to result in expression of type I IFN, can convert macrophages that have the M2 phenotype into M1 or M1-like macrophages, with immunosuppressive properties reduced or eliminated, and immune-stimulating, anti-tumor or anti-viral properties enhanced or added. Provided are immunostimulatory bacteria that contain a plasmid encoding a therapeutic product, where infection of a macrophage, including human macrophages, by the bacterium, converts an M2 macrophage to an M1 phenotype or M1-like phenotype macrophage. Provided are immunostimulatory bacteria that contain a plasmid encoding a therapeutic product whose expression in a macrophage results in the conversion of, or converts, M2 macrophages, such as human M2 macrophages, to an M1 or M1-like phenotype. The immunostimulatory bacteria provided herein include those whereby infection by the bacterium converts human M2 macrophages into M1-like, type I IFN producing cells. The immunostimulatory bacteria with such properties include any of the bacteria provided herein that contain genome modifications that result in infection of tumor-resident (in subjects with cancer), and tissue-resident myeloid cells. The immunostimulatory bacteria infect tumor-resident macrophages, but do not infect epithelial cells. These genome modifications include those that result in bacteria that do not have flagella, wherein the wild-type bacterium has flagella, and others, such as those that result in bacteria that are pagP^{-l}/msbB⁻. Other modifications include those that result in elimination of the asparaginase activity, such as modifications that result in bacteria that are ansB⁻, in the bacteria that infect myeloid cells, which thereby enhances T-cell activities, and other modifications that alter the lipopolysaccharide (LPS).

[0227] Among the immunostimulatory bacteria provided herein are those that have genome modifications, whereby the bacterial phenotype conferred by the genome is Δasd/ΔFLG/ΔpagP/ΔansB/ΔcsgD or Δasd/ΔFLG/ΔpagP/ΔansB/ΔcsgD/ΔmsbB/ΔpurI, whereby the plasmid optionally encodes aspartate-semialdehyde dehydrogenase (asd). Also provided is an immunostimulatory bacterium, comprising a plasmid encoding a therapeutic product under control of a eukaryotic promoter, wherein the genome of the immunostimulatory bacterium is modified by deletion or disruption of all or of a sufficient portion of the gene ansB, encoding L-asparaginase II, and by deletion or disruption of all or of a sufficient portion of the gene csgD, whereby the bacterium is ansB⁻ and does not express active L-asparaginase II, and is csgD⁻ and does not activate the synthesis of curli fimbriae. The bacteria also can comprise another genomic modification whereby biofilm formation is impaired.

[0228] Included are immunostimulatory bacteria, wherein the genome of the bacteria is modified by deletion or disruption of all or of a sufficient portion of the gene lppA and/or lppB, whereby the bacterium is lppA⁻ and/or lppB⁻, whereby expression in the tumor microenvironment and/or tumor-resident macrophages of the therapeutic protein encoded on the plasmid is increased, compared to the same immunostimulatory bacterium except with intact lppA and/or lppB.

[0229] Included are immunostimulatory bacteria that encode therapeutic products in macrophages that facilitate or result in the conversion of, or that convert M2 macrophages to an M1 or M1-like phenotype. Exemplary of the therapeutic products are those that are part of a cytosolic DNA/RNA sensor pathway that leads to expression of type I interferon (IFN), particularly constitutive expression. This includes the gain-of-function (GOF) variants of therapeutic products that are part of the cytosolic DNA/RNA sensor pathway, and that do not require cytosolic nucleic acids, nucleotides, dinucleotides, or cyclic dinucleotides to result in expression of type I IFN, such as the variant and non-human STING proteins as described and provided herein. The immunostimulatory bacteria include any that can be modified as described herein, including the species listed herein, such as Salmonella species and strains.

[0230] Also provided are immunostimulatory bacteria in which an encoded therapeutic product, such as a protein, is linked to a moiety that confers an improved pharmacological property, such as a pharmacokinetic or pharmacodynamic property, such as increased serum half-life. Hence, provided are immunostimulatory bacteria, where an encoded therapeutic product comprises an Fc domain, or a half-life extending moiety, such as human serum albumin, or a portion thereof. Half-life extension modalities or methods include, for example, PEGylation, modification of glycosylation, sialylation, PASylation (modification with polymers of PAS amino acids that are about 100-200 residues in length), ELPylation (see, e.g., Floss et al. (2010) Trends Biotechnol. 28(1):37-45), HAPylation (modification with a glycine homopolymer), fusion to human serum albumin, fusion to GLK, fusion to CTP, GLP fusion, fusion to the constant fragment (Fc) domain of a human immunoglobulin (IgG), fusion to transferrin, fusion to non-structured polypeptides, such as XTEN (also referred to as rPEG, which is a genetic fusion of non-exact repeat peptide sequences, containing A, E, G, P, S, and T; see, e.g., Schellenberger et al. (2009) Nat. Biotechnol. 27(12):1186-1190), and other such modifications and fusions that increase the size, increase the hydrodynamic radius, alter the charge, or target to receptors for recycling rather than clearance, and combinations of such modifications and fusions.

[0231] Also provided are immunostimulatory bacteria, where the encoded therapeutic product comprises the B7 protein transmembrane domain, or where the therapeutic product is GPI-anchored by virtue of an endogenous or added GPI anchor. The encoded therapeutic product can comprise a fusion to collagen.

[0232] The immunostimulatory bacteria in any and all embodiments can be any suitable species. Where reference is made to particular genes and gene modifications, the genes and modifications are those that correspond to the genes and modifications referenced with respect to Salmonella, as an exemplary species. Species and strains include, for example, a strain of Rickettsia, Klebsiella, Bordetella, Neisseria, Aeromonas, Francisella, Corynebacterium, Citrobacter, Chlamydia, Haemophilus, Brucella, Mycobacterium, Mycoplasma, Legionella, Rhodococcus, Pseudomonas, Helicobacter, Vibrio, Bacillus, and Erysipelothrix. For example, Rickettsia rickettsiae, Rickettsia prowazekii, Rickettsia tsutsugamushi, Rickettsia mooseri, Rickettsia sibirica, Bordetella bronchiseptica, Neisseria meningitidis, Neisseria gonorrhoeae, Aeromonas eucrenophila, Aeromonas salmonicida, Francisella tularensis, Corynebacterium pseudotuberculosis, Citrobacter freundii, Chlamydia pneumoniae, Haemophilus somnus, Brucella abortus, Mycobacterium intracellulare, Legionella pneumophila, Rhodococcus equi, Pseudomonas aeruginosa, Helicobacter mustelae, Vibrio cholerae, Bacillus subtilis, Erysipelothrix rhusiopathiae, Yersinia enterocolitica, Rochalimaea quintana, and Agrobacterium tumerfacium.

[0233] The immunostimulatory bacterium can be a Gram-negative bacterium. The immunostimulatory bacterium can be a strain of Salmonella, such as a Salmonella typhimurium strain. The unmodified Salmonella can be a wild-type strain, or can be an attenuated strain. The immunostimulatory bacterium can be derived from strain VNP20009 or YS1646, or from wild-type strain ATCC 14028, or from a strain having all of the identifying characteristics of strain ATCC 14028.

[0234] The immunostimulatory bacteria can be attenuated, or rendered of low toxicity or non-toxic, by virtue of the modifications described herein. Exemplary of bacteria are species of Salmonella, such as a Salmonella typhimurium strain. The immunostimulatory bacteria provided herein include those that endogenously encode and express, or are modified to encode and express, a gene encoding resistance to complement killing (rck), such as a Salmonella rck gene. Therapeutic E. coli are modified to encode rck so that they can be administered systemically.

[0235] The immunostimulatory bacterium can be one that, when intravenously administered at a therapeutic dose, induces less than 150 pg/ml of each of serum IL-6, serum TNF-alpha, and serum IL-10, when measures at 7 days post-treatment. The immunostimulatory bacterium can be administered at a dose of 1×10⁸ CFUs (colony forming units), or a dose of 1×10⁸ CFUs-1×10⁹ CFUs, for example.

[0236] Also provided, as described herein, and as set forth in the claims, are delivery vehicles, cells, pharmaceutical compositions, methods, uses, and treatments of cancer, particularly in humans. Also provided are companion diagnostics and methods for selection of subjects for treatment, and methods for monitoring treatment. These are described below and also in the claims, which are incorporated in their entirety into this section.

[0237] Provided herein are delivery vehicles that encode any of the therapeutic products and combinations thereof described herein, including, for example, an immunostimulatory bacterium, an exosome, a nanoparticle, an oncolytic virus, or a cell. The cell can be a stem cell, such as a mesenchymal stem cell (MSC), such as an MSC that is genetically modified to express a combination of immunomodulatory cytokines (e.g., IL-12 and IL-21).

[0238] Also provided are isolated cells, comprising the delivery vehicles or immunostimulatory bacteria provided herein, whereby the cell is an immune cell, a stem cell, a tumor cell, or a primary cell line, including a hematopoietic cell, a T-cell, CAR-T cell, or a mesenchymal stem cell (MSC) (such as an MSC that is genetically modified to express a combination of immunomodulatory cytokines (e.g., IL-12 and IL-21)). The cell can be produced ex vivo by infecting the cell with the delivery vehicle or immunostimulatory bacterium.

[0239] Also provided herein are pharmaceutical compositions, comprising the immunostimulatory bacteria, or the delivery vehicles, or the cells, in a pharmaceutically acceptable vehicle. The pharmaceutical composition can be formulated without dilution, formulated for systemic administration, formulated for parenteral administration, formulated for intravenous administration, formulated for intratumoral administration, formulated for intraperitoneal administration, formulated for subcutaneous administration, or formulated for oral administration, or formulated for any other suitable route of administration.

[0240] Also provided are methods of treatment of cancer that comprises a solid tumor or a hematological malignancy in a subject, comprising administering any of the immunostimulatory bacteria, or the delivery vehicles, or the cells, or the pharmaceutical compositions described herein, as well as uses of the immunostimulatory bacteria, or the delivery vehicles, or the cells, or the pharmaceutical compositions for the treatment of a cancer that comprises a solid tumor or a hematological malignancy in a subject. The subject can be a human, and the treatment can comprise combination therapy in which a second anti-cancer agent or treatment is administered, whereby the second anti-cancer agent or treatment is administered before, concomitantly with, after, or intermittently with, the immunostimulatory bacterium, delivery vehicle, cell, or pharmaceutical composition. The second anti-cancer agent or treatment can be an immunotherapy, such as, for example, an anti-PD-1, or anti-PD-L1, or anti-CTLA-4 antibody, or an antigen-binding portion or form thereof. The second anti-cancer agent or treatment can be an anti-IL-6, anti-Siglec-15, anti-VEGF, anti-CD73, or anti-CD38 antibody, or an antigen-binding portion or form thereof. The methods or treatments can comprise administering a second or further anti-cancer treatment, wherein the second or further treatment is a poly (ADP-ribose) polymerase (PARP) inhibitor, a histone deacetylase (HDAC) inhibitor, a chemotherapy agent, an anti-EGFR antibody, a CAR-T cell, an anti-Her2 antibody, an anti-mesothelin antibody, or an anti-B-cell maturation antigen (BCMA) antibody. The cancer can be metastatic. The cancer can be, for example, leukemia; lymphoma; gastric cancer; or cancer of the breast, heart, lung, small intestine, colon, spleen, kidney, bladder, head and neck, colorectum, ovary, prostate, brain, pancreas, skin, bone, bone marrow, blood, thymus, uterus, testicles, cervix, or liver.

[0241] Provided are methods of selecting a subject for treatment with the immunostimulatory bacteria, or the delivery vehicles, or the cells, or the pharmaceutical compositions, comprising obtaining a biological sample from the subject, and detecting one or more biomarkers that indicate an immune-excluded or immune-desert tumor phenotype. The biomarker can be selected from a test indicative of T-cell or tumor-infiltrating lymphocyte (TIL) infiltration into the tumor microenvironment; or a biomarker that measures the restriction of T-cells or TILs to the invasive margin of the tumor and tumor core; or the level of TILs; or an adenosine signature (Nanostring) indicative of CXCL1, CXCL2, CXCL3, CXCL5, CXCL8, THBS1, IL-6, CSF-3, IL-1beta, CCL2, CCL3, or CCL7; or a myeloid signature (Nanostring) indicative of CXCL1, CXCL2, CXCL3, CXCL8, IL-6, or PTGS2; or can be the levels of one or more of CD3, CD8, CD73, CD39, TNAP (tissue-nonspecific alkaline phosphatase), CD38, CD45, CD68, PD-L1, and FoxP3.

[0242] Also provided are methods of monitoring therapy with the immunostimulatory bacteria, or the delivery vehicles, or the cells, or the pharmaceutical compositions, comprising obtaining a biological sample from a subject, and detecting a change in the level of a biomarker, whereby:

[0243] an increase in a biomarker indicative of an anti-cancer phenotype indicates that treatment is effective; and

[0244] the biomarkers are any that indicate a cytokine response, activation of type I interferon, or activation of type II interferon. The biomarker can be the level of one or more of CXCL10/IP-10, CXCL9, interferon-alpha, interferon-beta, the pro-inflammatory serum cytokines IL-6, TNF-α, MCP-1, or CCL2, or IL-18 binding protein; or can be an increase in the level of one or more of the biomarkers that indicates that treatment is effective. The biological sample can be a tumor biopsy, or a sample of a body fluid.

[0245] The claims as filed in International PCT Application No. PCT/US2020/060307, filed on Nov. 12, 2020, are incorporated into the disclosure herein.

### BRIEF DESCRIPTION OF THE DRAWINGS

[0246] FIG. 1 depicts the alignment of wild-type human STING (SEQ ID NO:306) and Tasmanian devil STING (SEQ ID NO:349) proteins.

[0247] FIG. 2 depicts the alignment of wild-type human STING (SEQ ID NO:306) and marmoset STING (SEQ ID NO:359) proteins.

[0248] FIG. 3 depicts the alignment of wild-type human STING (SEQ ID NO:306) and cattle STING (SEQ ID NO:360) proteins.

[0249] FIG. 4 depicts the alignment of wild-type human STING (SEQ ID NO:306) and cat STING (SEQ ID NO:356) proteins.

[0250] FIG. 5 depicts the alignment of wild-type human STING (SEQ ID NO:306) and ostrich STING (SEQ ID NO:361) proteins.

[0251] FIG. 6 depicts the alignment of wild-type human STING (SEQ ID NO:306) and crested ibis STING (SEQ ID NO:362) proteins.

[0252] FIG. 7 depicts the alignment of wild-type human STING (SEQ ID NO:306) and coelacanth STING (SEQ ID NO:363) proteins.

[0253] FIG. 8 depicts the alignment of wild-type human STING (SEQ ID NO:306) and zebrafish STING (SEQ ID NO:348) proteins.

[0254] FIG. 9 depicts the alignment of wild-type human STING (SEQ ID NO:305) and boar STING (SEQ ID NO:365) proteins.

[0255] FIG. 10 depicts the alignment of wild-type human (SEQ ID NO:305) and bat STING (SEQ ID NO:366) proteins.

[0256] FIG. 11 depicts the alignment of wild-type human (SEQ ID NO:305) and manatee STING (SEQ ID NO:367) proteins.

[0257] FIG. 12 depicts the alignment of wild-type human (SEQ ID NO:305) and ghost shark STING (SEQ ID NO:368) proteins.

[0258] FIG. 13 depicts the alignment of wild-type human (SEQ ID NO:305) and mouse STING (SEQ ID NO:369) proteins.

[0259] FIG. 14 depicts an exemplary construct containing the asd expression cassette, including the bacterial promoter and any other bacterial regulatory sequence(s), placed in the opposite orientation of the cassette encoding the payload(s) under control of the eukaryotic promoter, and including bacterial terminators flanking the nucleic acid encoding the payload(s), and in the orientation to terminate any readthrough transcripts, from the prokaryotic promoter.

### DETAILED DESCRIPTION

[0260] OUTLINE
[0261] A. DEFINITIONS
[0262] B. OVERVIEW OF IMMUNOSTIMULATORY BACTERIA FOR CANCER THERAPY
   [0263] 1. Bacterial Cancer Immunotherapy
   [0264] 2. Prior Therapies that Target the Tumor Microenvironment
      [0265] a. Limitations of Autologous T-Cell Therapies
      [0266] b. Viral Vaccine Platforms
      [0267] c. Bacterial Cancer Therapies
         [0268] i. Listeria
         [0269] ii. Salmonella Species
         [0270] iii. VNP20009
         [0271] iv. Wild-Type Strains
   [0272] 3. Limitations of Existing Bacterial Cancer Immunotherapies
[0273] C. MODIFICATIONS AND ENHANCEMENTS OF IMMUNOSTIMULATORY BACTERIA TO INCREASE THERAPEUTIC INDEX AND TO INCREASE ACCUMULATION IN TUMOR-RESIDENT MYELOID CELLS
   [0274] 1. Deletions in Genes in the LPS Biosynthetic Pathway
      [0275] a. msbB Deletion
      [0276] b. pagP Deletion
   [0277] 2. Nutrient Auxotrophy
      [0278] a. purI Deletion/Disruption
      [0279] b. Adenosine Auxotrophy
   [0280] 3. Plasmid Maintenance and Delivery
      [0281] a. asd Deletion
      [0282] b. endA Deletion/Disruption
   [0283] 4. Flagellin Knockout Strains
   [0284] 5. Engineering Bacteria to Promote Adaptive Immunity and Enhance T-Cell Function L-asparaginase II (ansB) Deletion/Disruption
   [0285] 6. Deletions/Disruptions in Salmonella Genes Required for Curli Fimbriae Expression
   [0286] 7. Improving Resistance to Complement Rck Expression
   [0287] 8. Deletions of Genes Required for Lipoprotein Expression in Salmonella and Other Gram-Negative Bacteria
   [0288] 9. Robust Immunostimulatory Bacteria Whose Genomes are Modified to be Optimized for Anti-Tumor Therapy, and that Encode Therapeutic Products, Including a Plurality Thereof
   [0289] 10. Conversion of M2 Phenotype Macrophages into M1 and M1-Like Phenotype Macrophages
[0290] D. IMMUNOSTIMULATORY BACTERIA WITH ENHANCED THERAPEUTIC INDEX ENCODING GENETIC PAYLOADS THAT STIMULATE THE IMMUNE RESPONSE IN THE TUMOR MICROENVIRONMENT
   [0291] 1. Immunostimulatory Proteins
      [0292] a. Cytokines and Chemokines
      [0293] b. Co-Stimulatory Molecules
   [0294] 2. Molecules that Activate Prodrugs
   [0295] 3. Constitutively Active Proteins that Stimulate the Immune Response and/or Type I IFN, Non-Human STING Proteins, Chimeras, and Modified Forms
      [0296] a. Constitutive STING Expression and Gain-of-Function Mutations
      [0297] b. Constitutive IRF3 Expression and Gain-of-Function Mutations
      [0298] c. Non-Human STING Proteins, and Variants Thereof with Increased or Constitutive Activity, and STING Chimeras, and Variants Thereof with Increased or Constitutive Activity
      [0299] d. Other Gene Products that Act as Cytosolic DNA/RNA Sensors and Constitutive Variants Thereof
         [0300] i. RIG-I
         [0301] ii. MDA5/IFIH1
         [0302] iii. IRF7
      [0303] e. Other Type I IFN Regulatory Proteins
   [0304] 4. Antibodies and Antibody Fragments
      [0305] a. TGF-β
      [0306] b. Bispecific scFvs and T-Cell Engagers
      [0307] c. Anti-PD-1/Anti-PD-L1 Antibodies
      [0308] d. Anti-CTLA-4 Antibodies
      [0309] e. Additional Exemplary Checkpoint Targets
   [0310] 5. Combinations of Immunomodulatory Proteins can have Synergistic Effects and/or Complementary Effects
   [0311] 6. Immunostimulatory Bacteria that Deliver Combination Therapies
[0312] E. CONSTRUCTING EXEMPLARY PLASMIDS ENCODING THERAPEUTIC PRODUCTS FOR BACTERIAL DELIVERY
   [0313] 1. Constitutive Promoters for Heterologous Expression of Proteins
   [0314] 2. Multiple Therapeutic Product Expression Cassettes
      [0315] a. Single Promoter Constructs
      [0316] b. Dual/Multiple Promoter Constructs
   [0317] 3. Regulatory Elements
      [0318] a. Post-Transcriptional Regulatory Elements
      [0319] b. Polyadenylation Signal Sequences and Terminators
      [0320] c. Enhancers
      [0321] d. Secretion Signals
      [0322] e. Improving Bacterial Fitness
   [0323] 4. Origin of Replication and Plasmid Copy Number
   [0324] 5. CpG Motifs and CpG Islands
   [0325] 6. Plasmid Maintenance/Selection Components
   [0326] 7. DNA Nuclear Targeting Sequences
[0327] F. PHARMACEUTICAL PRODUCTION, COMPOSITIONS, AND FORMULATIONS
   [0328] 1. Manufacturing
      [0329] a. Cell Bank Manufacturing
      [0330] b. Drug Substance Manufacturing
      [0331] c. Drug Product Manufacturing
   [0332] 2. Compositions
   [0333] 3. Formulations
      [0334] a. Liquids, Injectables, Emulsions
      [0335] b. Dried Thermostable Formulations
   [0336] 4. Compositions for Other Routes of Administration
   [0337] 5. Dosages and Administration
   [0338] 6. Packaging and Articles of Manufacture
[0339] G. METHODS OF TREATMENT AND USES
   [0340] 1. Diagnostics for Patient Selection for Treatment and for Monitoring Treatment
      [0341] a. Patient Selection
      [0342] b. Diagnostics to Assess or Detect Activity of the Immunostimulatory Bacteria are Indicative of the Effectiveness of Treatment
   [0343] 2. Tumors
   [0344] 3. Administration
   [0345] 4. Monitoring
[0346] H. EXAMPLES

### A. Definitions

[0347] Unless defined otherwise, all technical and scientific terms used herein have the same meaning as is commonly understood by one of skill in the art to which the invention(s) belong. All patents, patent applications, published applications and publications, GenBank sequences, databases, websites and other published materials referred to throughout the entire disclosure herein, unless noted otherwise, are incorporated by reference in their entirety. In the event that there are a plurality of definitions for terms herein, those in this section prevail. Where reference is made to a URL or other such identifier or address, it is understood that such identifiers can change and particular information on the internet can come and go, but equivalent information can be found by searching the internet. Reference thereto evidences the availability and public dissemination of such information.

[0348] As used herein, “therapeutic bacteria” are bacteria that effect therapy, such as anti-cancer or anti-tumor therapy, when administered to a subject, such as a human.

[0349] As used herein, “immunostimulatory bacteria” are therapeutic bacteria that, when introduced into a subject, accumulate in immunoprivileged tissues and cells, such as tumors, the tumor microenvironment and tumor-resident immune cells, and replicate and/or express products that are immunostimulatory or that result in immunostimulation. For example, the immunostimulatory bacteria are attenuated in the host by virtue of reduced toxicity or pathogenicity and/or by virtue of encoded products that reduce toxicity or pathogenicity, as the immunostimulatory bacteria cannot replicate and/or express products (or have reduced replication/product expression), except primarily in immunoprivileged environments, such as the tumor microenvironment. Immunostimulatory bacteria provided herein are modified to encode a product or products or exhibit a trait or property that renders them immunostimulatory. The immunostimulatory bacteria also include genome modifications so that an endogenous product is not expressed. The bacteria can be said to be deleted in such product. Those of skill in the art recognize that genes can be inactivated by deletions, disruptions, including transposition or insertion of transposons, insertions, and any other changes that eliminate the gene product. This can be achieved by insertions, deletions, disruptions, including transpositions or inclusion of transposons. Examples of genes that are inactivated include, for example, msbB, pagP, ansB, gene(s) encoding curli fimbriae, genes encoding flagella whereby the bacterium lacks flagella, and other modifications described herein and/or known to those of skill in the art. Those of skill in the art also understand corresponding genes in various bacterial species may have different designations. The encoded products, properties and traits, in the immunostimulatory bacteria, include, but are not limited to, for example, at least one of: an immunostimulatory protein, such as a cytokine, chemokine, or co-stimulatory molecule; a cytosolic DNA/RNA sensor or gain-of-function or constitutively active variant thereof (e.g., STING, IRF3, IRF7, MDA5, and RIG-I); RNAi, such as siRNA (shRNA and microRNA), or CRISPR, that targets, disrupts, or inhibits a checkpoint gene, such as, for example, TREX1, PD-1, CTLA-4 and/or PD-L1; antibodies and fragments thereof, such as an anti-immune checkpoint antibody, an anti-IL-6 antibody, an anti-VEGF antibody, or a TGF-β inhibitory antibody; other antibody constructs, such as bi-specific T-cell engagers (BiTE® antibodies); soluble TGF-β receptors that act as decoys for binding TGF-β, or TGF-β antagonizing polypeptides; and IL-6 binding decoy receptors. Immunostimulatory bacteria also can include a modification that renders the bacterium auxotrophic for a metabolite that is immunosuppressive or that is in an immunosuppressive pathway, such as adenosine.

[0350] As used herein, the strain designations VNP20009 (see, e.g., International PCT Application Publication No. WO 99/13053, see, also U.S. Pat. No. 6,863,894), YS1646 and 41.2.9 are used interchangeably, and each refer to the strain deposited with the American Type Culture Collection (ATCC) and assigned Accession No. 202165. VNP20009 is a modified attenuated strain of Salmonella typhimurium, which contains deletions or other modifications in msbB and purI, and was generated from wild-type strain ATCC #14028.

[0351] As used herein, the strain designations YS1456 and 8.7 are used interchangeably and each refer to the strain deposited with the American Type Culture Collection (ATCC) and assigned Accession No. 202164 (see, U.S. Pat. No. 6,863,894).

[0352] As used herein, recitation that a bacterium is “derived from” a particular strain means that such strain can serve as a starting material and can be modified to result in the particular bacterium.

[0353] As used herein, an “expression cassette” refers to a nucleic acid construct that includes regulatory sequences for gene expression, operatively linked to nucleic acid encoding open reading frames (ORFs) that encode payloads, such as therapeutic products, or other proteins.

[0354] As used herein, 2A peptides are 18-22 amino-acid (aa)-long viral oligopeptides that mediate cleavage of polypeptides during translation in eukaryotic cells. The designation “2A” refers to a specific region of the viral genome, and different viral 2As have generally been named after the virus they were derived from. Exemplary of these are F2A (foot-and-mouth disease virus 2A), E2A (equine rhinitis A virus), P2A (porcine teschovirus-1 2A), and T2A (Thosea asigna virus 2A). See, e.g., Liu et al. (2017) Scientific Reports 7:2193, FIG. 1, for encoding sequences. See, also, SEQ ID NOs:327-330. These peptides generally share a core sequence motif of DxExNPGP, and occur in a large number of viral families. They help break apart polyproteins by causing the ribosome to fail at making a peptide bond. The 2A peptides provide for multicistronic/polycistronic vectors, in which a plurality of proteins are expressed from a single open reading frame (ORF). For purposes herein, the 2A peptides include those that are naturally occurring, and any modified forms thereof, such as any having at least 97%, 98%, or 99% sequence identity with any naturally-occurring 2A peptide, including those disclosed herein, that result in single polypeptides being transcribed and translated from a transcript comprising a plurality (2 or more) of open reading frames.

[0355] As used herein, an “interferonopathy” refers to a disorder associated with an upregulation of interferon by virtue of a mutation in a gene product involved in a pathway that regulates or induces expression of interferon. The activity of the products normally is regulated by a mediator, such as cytosolic DNA or RNA or nucleotides; when the protein product is mutated, the activity is constitutive. Type I interferonopathies include a spectrum of conditions, including the severe forms of Aicardi-Goutiéres Syndrome (AGS), and the milder Familial Chilblain Lupus (FCL). Nucleic acid molecules encoding mutated products with these properties can be produced in vitro, such as by selecting for mutations that result in a gain-of-function in the product, compared to the product of an allele that has normal activity, or has further gain-of-function compared to the disease-associated gain-of-function mutants described herein.

[0356] As used herein, a “gain-of-function mutation” is one that increases the activity of a protein compared to the same protein that does not have the mutation. For example, if the protein is a receptor, it will have increased affinity for a ligand; if it is an enzyme, it will have increased activity, including constitutive activity.

[0357] As used herein, an “origin of replication” is a sequence of DNA at which replication is initiated on a chromosome, or plasmid, or in a virus. For small DNA, including bacterial plasmids and small viruses, a single origin is sufficient.

[0358] The origin of replication determines the vector copy number, which depends upon the selected origin of replication. For example, if the expression vector is derived from the low-copy-number plasmid pBR322, the copy number is between about 15-20 copies/cell, and if derived from the high-copy-number plasmid pUC, it can be 500-700 copies/cell.

[0359] As used herein, medium copy number of a plasmid in cells is about or is 150 or less than 150, and low copy number is 5-30, such as 20 or less than 20. Low to medium copy number is less than 150 copies/cell. High copy number is greater than 150 copies/cell.

[0360] As used herein, a “CpG motif” is a pattern of bases that includes an unmethylated central CpG (“p” refers to the phosphodiester link between consecutive C and G nucleotides), surrounded by at least one base flanking (on the 3′ and the 5′ side of) the central CpG. A CpG oligodeoxynucleotide is an oligodeoxynucleotide that is at least about ten nucleotides in length and includes an unmethylated CpG. At least the C of the 5′ CG 3′ is unmethylated.

[0361] As used herein, a “RIG-I binding sequence” refers to a 5′triphosphate (5′ppp) structure directly, or that which is synthesized by RNA pol III from a poly(dA-dT) sequence, which, by virtue of interaction with RIG-I, can activate type I IFN via the RIG-I pathway. The RNA includes at least four A ribonucleotides (A-A-A-A); it can contain 4, 5, 6, 7, 8, 9, 10, or more. The RIG-I binding sequence is introduced into a plasmid in the bacterium for transcription into the polyA.

[0362] As used herein, “cytokines” are a broad and loose category of small proteins (˜5-20 kDa) that are important in cell signaling. Cytokines include chemokines, interferons, interleukins, lymphokines, and tumor necrosis factors. Cytokines are cell signaling molecules that aid cell to cell communication in immune responses, and stimulate the movement of cells towards sites of inflammation, infection and trauma.

[0363] As used herein, “chemokines” refer to chemoattractant (chemotactic) cytokines that bind to chemokine receptors and include proteins isolated from natural sources as well as those made synthetically, as by recombinant means or by chemical synthesis. Exemplary chemokines include, but are not limited to, IL-8, IL-10, GCP-2, GRO-α, GRO-β, GRO-γ, ENA-78, PBP, CTAP III, NAP-2, LAPF-4, MIG (CXCL9), CXCL10 (IP-10), CXCL11, PF4, SDF-1α, SDF-1β, SDF-2, MCP-1, MCP-2, MCP-3, MCP-4, MCP-5, MIP-1α (CCL3), MIP-1β (CCL4), MIP-1γ (CCL9), MIP-2, MIP-2a, MIP-3α, MIP-3β, MIP-4, MIP-5, MDC, HCC-1, ALP, lungkine, Tim-1, eotaxin-1, eotaxin-2, I-309, SCYA17, TRAC, RANTES (CCL5), DC-CK-1, lymphotactin, and fractalkine, and others known to those of skill in the art. Chemokines are involved in the migration of immune cells to sites of inflammation, as well as in the maturation of immune cells, and in the generation of adaptive immune responses.

[0364] As used herein, an “immunostimulatory protein” is a protein that exhibits or promotes an anti-tumor immune response in the tumor microenvironment. Exemplary of such proteins are cytokines, chemokines, and co-stimulatory molecules, such as, but not limited to, IFN-α, IFN-β, GM-CSF, IL-2, IL-7, IL-12, IL-15, IL-18, IL-21, IL-23, IL-12p70 (IL-12p40+IL-12p35), IL-15/IL-15R alpha chain complex (also referred to herein as IL-15Rα-IL-15sc, IL-15/IL-15Rα, and other variations as noted above), IL-36 gamma, IL-2 that has attenuated binding to IL-2Ra, IL-2 that is modified so that it does not bind to IL-2Ra, CXCL9, CXCL10 (IP-10), CXCL11, CCL3, CCL4, CCL5, molecules involved in the potential recruitment and/or persistence of T-cells, CD40, CD40 ligand (CD40L), OX40, OX40 ligand (OX40L), 4-1BB, 4-1BB ligand (4-1BBL), 4-1BBL with a deleted cytoplasmic domain (4-1BBLΔcyt) or with a partially deleted (truncated) cytoplasmic domain, members of the B7-CD28 family, and members of the tumor necrosis factor receptor (TNFR) superfamily.

[0365] Among the immunostimulatory proteins are truncated co-stimulatory molecules, such as, for example, 4-1BBL, CD80, CD86, CD27L, B7RP1 and OX40L, each with a full or partial cytoplasmic domain deletion, for expression on an antigen-presenting cell (APC). These truncated gene products, such as those with deletions or partial deletions of the cytoplasmic domain, are capable of constitutive immunostimulatory signaling to a T-cell through co-stimulatory receptor engagement, but are unable to counter-regulatory signal to the APC, due to a truncated or deleted cytoplasmic domain.

[0366] As used herein, a “cytoplasmic domain deletion” is a deletion in all, or a portion of, the amino acid residues that comprise the cytoplasmic, or intracellular, domain of the protein, where the deletion is sufficient to effect constitutive immunostimulatory signaling to a T-cell through co-stimulatory receptor engagement, and is sufficient to inhibit counter-regulatory signaling to the APC. For example, the cytoplasmic domain of human 4-1BBL (also known as TNFSF9) comprises amino acid residues 1-28 of SEQ ID NO:342. The cytoplasmic domain of human CD80 comprises amino acid residues 264-288 of the protein; the cytoplasmic domain of human CD86 comprises amino acid residues 269-329 of the protein; the cytoplasmic domain of human CD27L (also known as CD70) comprises amino acid residues 1-17 of the protein; the cytoplasmic domain of human B7RP1 (also known as ICOSLG or ICOS ligand) comprises amino acid residues 278-302 of the protein; and the cytoplasmic domain of human OX40L (also known as TNFSF4 or CD252) comprises amino acid residues 1-23 of the protein.

[0367] As used herein, a “decoy receptor” is a receptor that can specifically bind to specific growth factors or cytokines efficiently, but is not structurally able to signal or activate the intended receptor complex. The decoy receptor acts as an inhibitor by binding to a ligand and preventing it from binding to its cognate receptor.

[0368] For example, TGF-β family receptors include the cell-surface serine/threonine kinase receptors type I (TβRI or TGFβR1) and type II (TORII or TGFβR2), which form heteromeric complexes in the presence of dimerized ligands, as well as the type III receptor betaglycan (TβRIII or TGFβR3). Soluble decoy receptors for TGF-β, which prevent the binding of TGF-β to its receptors, include the soluble extracellular domains (the TGF-β binding regions) of TβRI, TβRII, or TβRIII (βglycan), which can be fused with other molecules, such as an Fc domain. Additionally, BAMBI (bone morphogenetic protein (BMP) and activin membrane-bound inhibitor) is structurally related to type I receptors and acts as a decoy that inhibits receptor activation. A dominant negative TGFβR2 (DN-TGFβR2), which comprises the extracellular domain of TGFβR2 and the transmembrane region, but which lacks the cytoplasmic domain required for signaling, also can be used as a TGF-β decoy receptor (see, e.g., International Application Publication No. WO 2018/138003).

[0369] As used herein, a co-stimulatory molecule agonist is a molecule that, upon binding to the co-stimulatory molecule, activates it or increases its activity. For example, the agonist can be an agonist antibody. CD40 agonist antibodies include, for example, CP-870,893, dacetuzumab, ADC-1013 (mitazalimab), and Chi Lob 7/4.

[0370] As used herein, a cytosolic DNA/RNA sensor pathway is one that is initiated by the presence of DNA, RNA, nucleotides, dinucleotides, cyclic nucleotides, and/or cyclic dinucleotides or other nucleic acid molecules, and that leads to production of type I interferon. The nucleic acid molecules in the cytosol occur from viral or bacterial or radiation or other such exposure, leading to activation of an immune response in a host.

[0371] As used herein, a “type I interferon pathway protein” is a protein that induces an innate immune response, such as the induction of type I interferon.

[0372] As used herein, a “cytosolic DNA/RNA sensor,” is a protein that is part of a cytosolic DNA/RNA sensor pathway that leads to expression of an immune response mediator, such as type I interferon. A “cytosolic DNA/RNA sensor,” includes type I interferon pathway proteins. For example, as described herein and known to those of skill in the art, cytosolic DNA is sensed by cGAS, leading to the production of cGAMP and subsequent STING/TBK1/IRF3 signaling, and type I IFN production. Bacterial cyclic dinucleotides (such as bacterial cyclic di-AMP) also activate STING. Hence, STING is an immunomodulatory protein that induces type I interferon. 5′-triphosphate RNA and double stranded RNA are sensed by RIG-I and either MDA-5 alone, or MDA-5/LGP2. This leads to polymerization of mitochondrial MAVS (mitochondrial antiviral-signaling protein), and also activates TANK-binding kinase 1 (TBK1) and interferon regulatory factor 3 (IRF3). The proteins in such pathways are immunostimulatory and lead to expression of innate immune response mediators, such as type I interferon. The immunomodulatory proteins in the DNA/RNA sensor pathways can be modified so that they have increased activity, or act constitutively in the absence of cytosolic nucleic acids and/or activating/stimulating ligands or signals, to lead to the immune response, such as the expression of type I interferon.

[0373] As used herein, the “carboxy-terminal tail” or “C-terminal tail” (CTT) of the innate immune protein STING refers to the C-terminal portion of a STING protein that, in a wild-type STING protein, is tethered to the cGAMP-binding domain by a flexible linker region. The CTT includes an IRF3 binding site, a TBK1 binding site, and a TRAF6 binding site. STING promotes the induction of interferon beta (IFN-β) production via the phosphorylation of the STING protein C-terminal tail (CTT) by TANK-binding kinase 1 (TBK1). The interaction between STING and TBK1 is mediated by an evolutionarily conserved stretch of eight amino-acid residues in the carboxy-terminal tail (CTT) of STING. TRAF6 catalyzes the formation of K63-linked ubiquitin chains on STING, leading to the activation of the transcription factor NF-κB and the induction of an alternative STING-dependent gene expression program. Deletion or disruption of the TRAF6 binding site in the CTT can reduce activation of NF-κB signaling. Substitution of the human STING CTT (or portions thereof), with the CTT (or corresponding portion thereof) from the STING protein of a species with low NF-κB activation, can decrease NF-κB activation by the resulting modified human STING protein. The STING CTT is an unstructured stretch of ˜40 amino acids that contains sequence motifs required for STING phosphorylation and recruitment of IRF3 (see, de Oliveira Mann et al. (2019) Cell Reports 27:1165-1175). Human STING residue 5366 has been identified as a primary TBK1 phosphorylation site that is part of an LxIS motif shared among innate immune adaptor proteins that activate interferon signaling (see, de Oliveira Mann et al. (2019) Cell Reports 27:1165-1175). The human STING CTT contains a second PxPLR motif that includes the residue L374, which is required for TBK1 binding; the LxIS and PxPLR sequences are conserved among vertebrate STING alleles (see, de Oliveira Mann et al. (2019) Cell Reports 27:1165-1175). Exemplary STING CTT sequences, and the IRF3, TBK1, and TRAF6 binding sites, are set forth in the following table:

| | | SEQ | IRF3 | TBK1 | TRAF6 |
|---|---|---|---|---|---|
| | C-Terminal Tail (CTT) | ID | Binding | Binding | Binding |
| Species | Sequence | NO. | Site | Site | Site |
| Human | EKEEVTVGSLKTSAVPSTSTMS | 370 | PELLIS | PLPLRT | DFS |
| | QEPELLISGMEKPLPLRTDFS | | | | |
| Tasmanian | RQEEFAIGPKRAMTVTTSSTLS | 371 | PQLLIS | PLSLRT | DGF |
| devil | QEPQLLISGMEQPLSLRTDGF | | | | |
| Marmoset | EEEEVTVGSLKTSEVPSTSTMS | 372 | PELLIS | PLPLRS | DLF |
| | QEPELLISGMEKPLPLRSDLF | | | | |
| Cattle | EREVTMGSTETSVMPGSSVLS | 373 | PELLIS | PLPLRS | DVF |
| | QEPELLISGLEKPLPLRSDVF | | | | |
| Cat | EREVTVGSVGTSMVRNPSVLS | 374 | PNLLIS | PLPLRT | DVF |
| | QEPNLLISGMEQPLPLRTDVF | | | | |
| Ostrich | RQEEYTVCDGTLCSTDLSLQIS | 375 | LSLQIS | PQPLRS | DCL |
| | ESDLPQPLRSDCL | | | | |
| Boar | EREVTMGSAETSVVPTSSTLSQ | 376 | PELLIS | PLPLRS | DIF |
| | EPELLISGMEQPLPLRSDIF | | | | |
| Bat | EKEEVTVGTVGTYEAPGSSTL | 377 | PELLIS | PLPLRT | DIF |
| | HQEPELLISGMDQPLPLRTDIF | | | | |
| Manatee | EREEVTVGSVGTSVVPSPSSPS | 378 | PKLLIS | PLPLRT | DVF |
| | TSSLSQEPKLLISGMEQPLPLRT | | | | |
| | DVF | | | | |
| Crested ibis | CHEEYTVYEGNQPHNPSTTLH | 379 | LNLQIS | PQPLRS | DCF |
| | STELNLQISESDLPQPLRSDCF | | | | |
| Coelacanth | QKEEYFMSEQTQPNSSSTSCLS | 380 | PQLMIS | PHTLKR | QVC |
| (variant 1) | TEPQLMISDTDAPHTLKRQVC | | | | |
| Coelacanth | QKEEYFMSEQTQPNSSSTSCLS | 381 | PQLMIS | PHTLKS | GF |
| (variant 2) | TEPQLMISDTDAPHTLKSGF | | | | |
| Zebrafish | DGEIFMDPTNEVHPVPEEGPV | 382 | PTLMFS | PQSLRS | EPVETTDY |
| | GNCNGALQATFHEEPMSDEPT | | | | |
| | LMFSRPQSLRSEPVETTDYFNP | | | | |
| | SSAMKQN | | | | |
| Ghost | LTEYPVAEPSNANETDCMSSE | 383 | PHLMIS | PKPLRS | YCP |
| shark | PHLMISDDPKPLRSYCP | | | | |
| Mouse | EKEEVTMNAPMTSVAPPPSVL | 384 | PRLLIS | PLPLRT | DLI |
| | SQEPRLLISGMDQPLPLRTDLI | | | | |

[0374] As used herein, a “STING pathway agonist” is any product that increases type I interferon (IFN) expression via activation of the STING pathway. Exemplary of such agonists are the gain-of-function STING polypeptide variants provided herein, as well as gain-of-function variants of other cytosolic DNA/RNA sensors, and type I IFN pathway proteins, such as variants of IRF-3, IRF-7, MDA5, and RIG-I, that increase or render expression of type I IFN constitutive, via the STING pathway.

[0375] As used herein, a bacterium that is modified so that it “induces less cell death in tumor-resident immune cells” or “induces less cell death in immune cells” is one that is less toxic than the bacterium without the modification, or one that has reduced virulence compared to the bacterium without the modification. Exemplary of such modifications are those that eliminate pyroptosis in phagocytic cells and that alter lipopolysaccharide (LPS) profiles on the bacterium. These modifications include disruption of or deletion of flagellin genes, pagP, or one or more components of the SPI-1 pathway, such as hilA, rod protein (e.g., prgJ), needle protein (e.g., prgI), and QseC.

[0376] As used herein, a bacterium that is “modified so that it preferentially infects tumor-resident immune cells” or “modified so that it preferentially infects immune cells” has a modification in its genome that reduces its ability to infect cells other than immune cells. Exemplary of such modifications are modifications that disrupt the type 3 secretion system or type 4 secretion system or other genes or systems that affect the ability of a bacterium to invade a non-immune cell. For example, modifications include disruption/deletion of an SPI-1 component, which is needed for infection of cells, such as epithelial cells, but does not affect infection of immune cells, such as phagocytic cells, by Salmonella.

[0377] As used herein, a “modification” is in reference to modification of a sequence of amino acids of a polypeptide, or a sequence of nucleotides in a nucleic acid molecule, and includes deletions, insertions, and replacements of amino acids or nucleotides, respectively. Methods of modifying a polypeptide are routine to those of skill in the art, such as by using recombinant DNA methodologies.

[0378] As used herein, a modification to a bacterial genome, or to a plasmid, or to a gene, includes deletions, replacements, and insertions of nucleic acid.

[0379] As used herein, RNA interference (RNAi) is a biological process in which RNA molecules inhibit gene expression or translation, by neutralizing targeted mRNA molecules to inhibit translation, and thereby expression, of a targeted gene.

[0380] As used herein, RNA molecules that act via RNAi are referred to as inhibitory by virtue of their silencing of the expression of a targeted gene. Silencing expression means that expression of the targeted gene is reduced, or suppressed, or inhibited.

[0381] As used herein, gene silencing via RNAi is said to inhibit, suppress, disrupt, or silence expression of a targeted gene. A targeted gene contains sequences of nucleotides that correspond to the sequences in the inhibitory RNA, whereby the inhibitory RNA silences expression of target mRNA.

[0382] As used herein, inhibiting, suppressing, disrupting, or silencing a targeted gene, refers to processes that alter expression, such as translation, of the targeted gene, whereby activity or expression of the product encoded by the targeted gene is reduced. Reduction includes a complete knock-out or a partial knockout, whereby, with reference to the immunostimulatory bacteria provided herein and administration herein, treatment is effected.

[0383] As used herein, small interfering RNAs (siRNAs) are small pieces of double-stranded (ds) RNA, usually about 21 nucleotides long, with 3′ overhangs (2 nucleotides) at each end that can be used to “interfere” with the translation of proteins by binding to and promoting the degradation of messenger RNA (mRNA) at specific sequences. In doing so, siRNAs prevent the production of specific proteins based on the nucleotide sequences of their corresponding mRNAs. The process is called RNA interference (RNAi), and also is referred to as siRNA silencing, or siRNA knockdown.

[0384] As used herein, a short-hairpin RNA or small-hairpin RNA (shRNA) is an artificial RNA molecule with a tight hairpin turn that can be used to silence target gene expression via RNA interference (RNAi). Expression of shRNA in cells is typically accomplished by delivery of plasmids, or through viral or bacterial vectors.

[0385] As used herein, a tumor microenvironment (TME) is the cellular environment in which the tumor exists, including surrounding blood vessels, immune cells, fibroblasts, bone marrow-derived inflammatory cells, lymphocytes, signaling molecules and the extracellular matrix (ECM). Conditions that exist include, but are not limited to, increased vascularization, hypoxia, low pH, increased lactate concentration, increased pyruvate concentration, increased interstitial fluid pressure, and altered metabolites or metabolism, such as higher levels of adenosine, which are indicative of a tumor.

[0386] As used herein, “bactofection” refers to the bacteria-mediated transfer of genes or plasmid DNA into eukaryotic cells, such as mammalian cells.

[0387] As used herein, human type I interferons (IFNs) are a subgroup of interferon proteins that regulate the activity of the immune system. All type I IFNs bind to a specific cell surface receptor complex, such as the IFN-α receptor. Type I interferons include IFN-α and IFN-β, among others. Myeloid cells are the primary producers of IFN-α and IFN-β, which have antiviral activity that is involved mainly in innate immune responses. Two types of IFN-β are IFN-β1 (IFNB1) and IFN-β3 (IFNB3).

[0388] As used herein, “M1 macrophage phenotype” and “M2 macrophage phenotype” refer to the two broad groups into which macrophage phenotypes are divided: M1 (classically activated macrophages) and M2 (alternatively activated macrophages). The role of M1 macrophages is to secrete pro-inflammatory cytokines and chemokines, and to present antigens, so that they participate in the positive immune response, and function as an immune monitor. The main pro-inflammatory cytokines they produce are IL-6, IL-12, and TNF-alpha. M2 macrophages primarily secrete arginase-I, IL-10, TGF-β, and other anti-inflammatory cytokines, which have the function of reducing inflammation, and contributing to tumor growth and immunosuppressive function. A macrophage with an M1-like phenotype secretes pro-inflammatory cytokines, and does not have the immunosuppressive activity(ies) of an M2 macrophage. Conversion of an M2 macrophage into a macrophage with an M1 or M1-like phenotype converts an M2 macrophage into one that is not immunosuppressive, but participates in an anti-tumor response. An M2 macrophage that is converted into a macrophage with an M1 or M1-like phenotype exhibits the secretion/expression of more pro-inflammatory cytokines/chemokines and receptors, such as CD80 and CCR7, and chemokines, such as IFNγ and CXCL10. M1 phenotypic markers include, but are not limited to, one or more of CD80, CD86, CD64, CD16, and CD32. The expression of nitric oxide synthase (iNOS) in M1 macrophages also can serve as a phenotypic marker. CD163 and CD206 are major markers for the identification of M2 macrophages. Other surface markers for M2-type cells also include CD68. A reduction or elimination of any of the M2 markers, and an increase in cytokines/chemokines that are indicative of M1 macrophages, reflect a conversion from an M2 phenotype into an M1 or M1-like phenotype. The sections below, and the working examples regarding M2 to M1-like or M1 phenotype conversion, describe exemplary cytokine profiles and markers that are induced.

[0389] As used herein, recitation that a nucleic acid or encoded RNA targets a gene means that it inhibits or suppresses or silences expression of the gene by any mechanism. Generally, such nucleic acid includes at least a portion complementary to the targeted gene, where the portion is sufficient to form a hybrid with the complementary portion.

[0390] As used herein, “deletion,” when referring to a nucleic acid or polypeptide sequence, refers to the deletion of one or more nucleotides or amino acids compared to a sequence, such as a target polynucleotide, or polypeptide, or a native or wild-type sequence.

[0391] As used herein, “insertion,” when referring to a nucleic acid or amino acid sequence, describes the inclusion of one or more additional nucleotides or amino acids, within a target, native, wild-type or other related sequence. Thus, a nucleic acid molecule that contains one or more insertions compared to a wild-type sequence, contains one or more additional nucleotides within the linear length of the sequence.

[0392] As used herein, “additions” to nucleic acid and amino acid sequences describe addition of nucleotides or amino acids onto either termini compared to another sequence.

[0393] As used herein, “substitution” or “replacement” refers to the replacing of one or more nucleotides or amino acids in a native, target, wild-type or other nucleic acid or polypeptide sequence with an alternative nucleotide or amino acid, without changing the length (as described in numbers of nucleotides or residues) of the molecule. Thus, one or more substitutions in a molecule does not change the number of nucleotides or amino acid residues of the molecule. Amino acid replacements compared to a particular polypeptide can be expressed in terms of the number of the amino acid residue along the length of the polypeptide sequence.

[0394] As used herein, “at a position corresponding to,” or recitation that nucleotides or amino acid positions “correspond to” nucleotides or amino acid positions in a disclosed sequence, such as set forth in the Sequence Listing, refers to nucleotides or amino acid positions identified upon alignment with the disclosed sequence to maximize identity using a standard alignment algorithm, such as the GAP algorithm. By aligning the sequences, one skilled in the art can identify corresponding residues, for example, using conserved and identical amino acid residues as guides. In general, to identify corresponding positions, the sequences of amino acids are aligned so that the highest order match is obtained (see, e.g., Computational Molecular Biology, Lesk, A. M., ed., Oxford University Press, New York, 1988; Biocomputing: Informatics and Genome Projects, Smith, D. W., ed., Academic Press, New York, 1993; Computer Analysis of Sequence Data, Part I, Griffin, A. M., and Griffin, H. G., eds., Humana Press, New Jersey, 1994; Sequence Analysis in Molecular Biology, von Heinje, G., Academic Press, 1987; Sequence Analysis Primer, Gribskov, M. and Devereux, J., eds., M Stockton Press, New York, 1991; and Carrillo et al. (1988) SIAM J. Applied Math 48:1073).

[0395] As used herein, alignment of a sequence refers to the use of homology to align two or more sequences of nucleotides or amino acids. Typically, two or more sequences that are related by 50% or more identity are aligned. An aligned set of sequences refers to 2 or more sequences that are aligned at corresponding positions and can include aligning sequences derived from RNAs, such as ESTs and other cDNAs, aligned with a genomic DNA sequence. Related or variant polypeptides or nucleic acid molecules can be aligned by any method known to those of skill in the art. Such methods typically maximize matches, and include methods, such as using manual alignments, and by using the numerous alignment programs available (e.g., BLASTP) and others known to those of skill in the art. By aligning the sequences of polypeptides or nucleic acids, one skilled in the art can identify analogous portions or positions, using conserved and identical amino acid residues as guides. Further, one skilled in the art also can employ conserved amino acid or nucleotide residues as guides to find corresponding amino acid or nucleotide residues between and among human and non-human sequences. Corresponding positions also can be based on structural alignments, for example by using computer simulated alignments of protein structure. In other instances, corresponding regions can be identified. One skilled in the art also can employ conserved amino acid residues as guides to find corresponding amino acid residues between and among human and non-human sequences.

[0396] As used herein, a “property” of a polypeptide, such as an antibody, refers to any property exhibited by a polypeptide, including, but not limited to, binding specificity, structural configuration or conformation, protein stability, resistance to proteolysis, conformational stability, thermal tolerance, and tolerance to pH conditions. Changes in properties can alter an “activity” of the polypeptide. For example, a change in the binding specificity of the antibody polypeptide can alter the ability to bind an antigen, and/or various binding activities, such as affinity or avidity, or in vivo activities of the polypeptide.

[0397] As used herein, an “activity” or a “functional activity” of a polypeptide, such as an antibody, refers to any activity exhibited by the polypeptide. Such activities can be empirically determined. Exemplary activities include, but are not limited to, the ability to interact with a biomolecule, for example, through antigen-binding, DNA binding, ligand binding, or dimerization, or enzymatic activity, for example, kinase activity, or proteolytic activity. For an antibody (including antibody fragments), activities include, but are not limited to, the ability to specifically bind a particular antigen, affinity of antigen-binding (e.g., high or low affinity), avidity of antigen-binding (e.g., high or low avidity), on-rate, off-rate, effector functions, such as the ability to promote antigen neutralization or clearance, virus neutralization, and in vivo activities, such as the ability to prevent infection or invasion of a pathogen, or to promote clearance, or to penetrate a particular tissue or fluid or cell in the body. Activity can be assessed in vitro or in vivo using recognized assays, such as ELISA, flow cytometry, surface plasmon resonance, or equivalent assays to measure on-rate or off-rate, immunohistochemistry and immunofluorescence histology and microscopy, cell-based assays, and binding assays (e.g., panning assays).

[0398] As used herein, “bind,” “bound,” or grammatical variations thereof, refers to the participation of a molecule in any attractive interaction with another molecule, resulting in a stable association in which the two molecules are in close proximity to one another. Binding includes, but is not limited to, non-covalent bonds, covalent bonds (such as reversible and irreversible covalent bonds), and includes interactions between molecules such as, but not limited to, proteins, nucleic acids, carbohydrates, lipids, and small molecules, such as chemical compounds, including drugs.

[0399] As used herein, “antibody” refers to immunoglobulins and immunoglobulin fragments, whether natural, or partially or wholly synthetically, such as recombinantly produced, including any fragment thereof containing at least a portion of the variable heavy chain and light region of the immunoglobulin molecule that is sufficient to form an antigen-binding site and, when assembled, to specifically bind an antigen. Hence, an antibody includes any protein having a binding domain that is homologous or substantially homologous to an immunoglobulin antigen-binding domain (antibody combining site). For example, an antibody refers to an antibody that contains two heavy chains (which can be denoted H and H′) and two light chains (which can be denoted L and L′), where each heavy chain can be a full-length immunoglobulin heavy chain or a portion thereof sufficient to form an antigen-binding site (e.g., heavy chains include, but are not limited to, V_{H} chains, V_{H}-C_{H}1 chains, and V_{H}-C_{H}1-C_{H}2-C_{H}3 chains), and each light chain can be a full-length light chain or a portion thereof sufficient to form an antigen-binding site (e.g., light chains include, but are not limited to, V_{L} chains and V_{L}-C_{L} chains). Each heavy chain (H and H′) pairs with one light chain (L and L′, respectively). Typically, antibodies minimally include all or at least a portion of the variable heavy (V_{H}) chain and/or the variable light (V_{L}) chain. The antibody also can include all or a portion of the constant region.

[0400] For purposes herein, the term antibody includes full-length antibodies and portions thereof including antibody fragments, such as anti-CTLA-4 antibody fragments. Antibody fragments, include, but are not limited to, Fab fragments, Fab′ fragments, F(ab′)₂ fragments, Fv fragments, disulfide-linked Fvs (dsFv), Fd fragments, Fd′ fragments, single-chain Fvs (scFvs), scFv-Fc fragments (in which the V_{H} domain in the scFv is linked to an Fc, such as a human IgG1 Fc, for example), single-chain Fabs (scFabs), diabodies, anti-idiotypic (anti-Id) antibodies, or antigen-binding fragments of any of the above. Antibody also includes synthetic antibodies, recombinantly produced antibodies, multi-specific antibodies (e.g., bispecific antibodies), human antibodies, non-human antibodies, humanized antibodies, chimeric antibodies, and intrabodies. Antibodies provided herein include members of any immunoglobulin class (e.g., IgG, IgM, IgD, IgE, IgA and IgY), any subclass (e.g., IgG1, IgG2, IgG3, IgG4, IgA1, and IgA2), or sub-subclass (e.g., IgG2a and IgG2b). Antibodies for human therapy generally are human antibodies or are humanized.

[0401] As used herein, “antibody fragment(s)” refers to (i) monovalent and monospecific antibody derivatives that contain the variable heavy and/or light chains, or functional fragments of an antibody and lack an Fc part; and (ii) BiTEs® (tandem scFvs), dual-affinity re-targeting antibodies (referred to in the art as DARTs), diabodies, single-chain diabodies (scDbs), any other forms of bi-specific or multi-specific antibodies, known to those of skill in the art. Thus, an antibody fragment includes, for example, a/an: Fab, Fab′, scFab, scFv, scFv-Fc, Fv fragment, nanobody (see, e.g., antibodies derived from Camelus bactriamus, Camelus dromedarius, or Lama pacos) (see, e.g., U.S. Pat. No. 5,759,808; and Stijlemans et al. (2004) J. Biol. Chem. 279:1256-1261), V_{HH}, single-domain antibody (dAb or sdAb), minimal recognition unit, single-chain diabody (scDb), BiTE® antibodies, and DART antibodies, and variations thereof. The recited antibody fragments typically have a molecular weight below 60 kDa.

[0402] As used herein, “nucleic acid” refers to at least two linked nucleotides or nucleotide derivatives, including a deoxyribonucleic acid (DNA) and a ribonucleic acid (RNA), joined together, typically by phosphodiester linkages. Also included in the term “nucleic acid” are analogs of nucleic acids, such as peptide nucleic acid (PNA), phosphorothioate DNA, and other such analogs and derivatives, or combinations thereof. Nucleic acids also include DNA and RNA derivatives containing, for example, a nucleotide analog or a “backbone” bond other than a phosphodiester bond, for example, a phosphotriester bond, a phosphoramidate bond, a phosphorothioate bond, a thioester bond, or a peptide bond (peptide nucleic acid). The term also includes equivalents, derivatives, variants and analogs of either RNA or DNA made from nucleotide analogs, and single-stranded (sense or antisense) and double-stranded nucleic acids. Deoxyribonucleotides include deoxyadenosine, deoxycytidine, deoxyguanosine, and deoxythymidine. For RNA, the uracil base is uridine.

[0403] As used herein, an isolated nucleic acid molecule is one which is separated from other nucleic acid molecules which are present in the natural source of the nucleic acid molecule. An “isolated” nucleic acid molecule, such as a cDNA molecule, can be substantially free of other cellular material, or culture medium when produced by recombinant techniques, or substantially free of chemical precursors or other chemicals when chemically synthesized. Exemplary isolated nucleic acid molecules provided herein include isolated nucleic acid molecules encoding an antibody or antigen-binding fragments provided herein.

[0404] As used herein, “operably linked” or “operatively linked,” with reference to nucleic acid sequences, regions, elements, or domains, means that the nucleic acid regions are functionally related to each other. It refers to a juxtaposition whereby the components so described are in a relationship permitting them to function in their intended manner. For instance, a promoter is operably linked to a coding sequence if the promoter effects or affects its transcription or expression. For example, a nucleic acid encoding a leader peptide can be operably linked to a nucleic acid encoding a polypeptide, whereby the nucleic acids can be transcribed and translated to express a functional fusion protein, wherein the leader peptide effects secretion of the fusion polypeptide. In some instances, the nucleic acid encoding a first polypeptide (e.g., a leader peptide) is operably linked to a nucleic acid encoding a second polypeptide, and the nucleic acids are transcribed as a single mRNA transcript, but translation of the mRNA transcript can result in one of two polypeptides being expressed. For example, an amber stop codon can be located between the nucleic acid encoding the first polypeptide and the nucleic acid encoding the second polypeptide, such that, when introduced into a partial amber suppressor cell, the resulting single mRNA transcript can be translated to produce either a fusion protein containing the first and second polypeptides, or can be translated to produce only the first polypeptide. In another example, a promoter can be operably linked to nucleic acid encoding a polypeptide, whereby the promoter regulates or mediates the transcription of the nucleic acid.

[0405] As used herein, “synthetic,” with reference to, for example, a synthetic nucleic acid molecule or a synthetic gene or a synthetic peptide, refers to a nucleic acid molecule, or gene, or polypeptide molecule that is produced by recombinant methods and/or by chemical synthesis methods.

[0406] As used herein, the residues of naturally occurring α-amino acids are the residues of those 20 α-amino acids found in nature which are incorporated into a protein by the specific recognition of the charged tRNA molecule with its cognate mRNA codon in humans.

[0407] As used herein, a “polypeptide” refers to two or more amino acids covalently joined. The terms “polypeptide” and “protein” are used interchangeably herein.

[0408] As used herein, a “peptide” refers to a polypeptide that is from 2 to about or 40 amino acids in length.

[0409] As used herein, an “amino acid” is an organic compound containing an amino group and a carboxylic acid group. A polypeptide contains two or more amino acids. For purposes herein, amino acids contained in the antibodies and immunostimulatory proteins provided herein, include the twenty naturally-occurring amino acids (see Table below), non-natural amino acids, and amino acid analogs (e.g., amino acids wherein the α-carbon has a side chain). As used herein, the amino acids, which occur in the various amino acid sequences of polypeptides appearing herein, are identified according to their well-known, three-letter or one-letter abbreviations (see Table below). The nucleotides, which occur in the various nucleic acid molecules and fragments, are designated with the standard single-letter designations used routinely in the art.

[0410] As used herein, “amino acid residue” refers to an amino acid formed upon chemical digestion (hydrolysis) of a polypeptide at its peptide linkages. The amino acid residues described herein are generally in the “L” isomeric form. Residues in the “D” isomeric form can be substituted for any L-amino acid residue, as long as the desired functional property is retained by the polypeptide. NH₂ refers to the free amino group present at the amino terminus of a polypeptide. COOH refers to the free carboxy group present at the carboxyl terminus of a polypeptide. In keeping with standard polypeptide nomenclature described in J. Biol. Chem., 243:3557-59 (1968) and adopted at 37 C.F.R. §§ 1.821-1.822, abbreviations for amino acid residues are shown in the following Table:

Table of Correspondence

SYMBOL

| 1-Letter | 3-Letter | AMINO ACID |
|---|---|---|
| Y | Tyr | Tyrosine |
| G | Gly | Glycine |
| F | Phe | Phenylalanine |
| M | Met | Methionine |
| A | Ala | Alanine |
| S | Ser | Serine |
| I | Ile | Isoleucine |
| L | Leu | Leucine |
| T | Thr | Threonine |
| V | Val | Valine |
| P | Pro | Proline |
| K | Lys | Lysine |
| H | His | Histidine |
| Q | Gln | Glutamine |
| E | Glu | Glutamic acid |
| Z | Glx | Glutamic Acid and/or Glutamine |
| W | Trp | Tryptophan |
| R | Arg | Arginine |
| D | Asp | Aspartic acid |
| N | Asn | Asparagine |
| B | Asx | Aspartic Acid and/or Asparagine |
| C | Cys | Cysteine |
| X | Xaa | Unknown or other |

[0411] All sequences of amino acid residues represented herein by a formula have a left to right orientation in the conventional direction of amino-terminus to carboxyl-terminus. The phrase “amino acid residue” is defined to include the amino acids listed in the above Table of Correspondence, as well as modified, non-natural, and unusual amino acids. A dash at the beginning or end of an amino acid residue sequence indicates a peptide bond to a further sequence of one or more amino acid residues, or to an amino-terminal group such as NH₂, or to a carboxyl-terminal group such as COOH.

[0412] In a peptide or protein, suitable conservative substitutions of amino acids are known to those of skill in the art and generally can be made without altering a biological activity of a resulting molecule. Those of skill in the art recognize that, in general, single amino acid substitutions in non-essential regions of a polypeptide do not substantially alter biological activity (see, e.g., Watson et al., Molecular Biology of the Gene, 4th Edition, 1987, The Benjamin/Cummings Pub. Co., p. 224).

[0413] Such substitutions can be made in accordance with the exemplary substitutions set forth in the following Table:

Exemplary Conservative Amino Acid Substitutions

| | Exemplary |
|---|---|
| | Conservative |
| Original Residue | Substitution(s) |
| Ala (A) | Gly; Ser |
| Arg (R) | Lys |
| Asn (N) | Gln; His |
| Cys (C) | Ser |
| Gln (Q) | Asn |
| Glu (E) | Asp |
| Gly (G) | Ala; Pro |
| His (H) | Asn; Gln |
| Ile (I) | Leu; Val |
| Leu (L) | Ile; Val |
| Lys (K) | Arg; Gln; Glu |
| Met (M) | Leu; Tyr; Ile |
| Phe (F) | Met; Leu; Tyr |
| Ser (S) | Thr |
| Thr (T) | Ser |
| Trp (W) | Tyr |
| Tyr (Y) | Trp; Phe |
| Val (V) | Ile; Leu |

[0414] Other substitutions also are permissible and can be determined empirically or in accord with other known conservative or non-conservative substitutions.

[0415] As used herein, “naturally occurring amino acids” refer to the 20 L-amino acids that occur in polypeptides.

[0416] As used herein, the term “non-natural amino acid” refers to an organic compound that has a structure similar to a natural amino acid, but that has been modified structurally to mimic the structure and reactivity of a natural amino acid. Non-naturally occurring amino acids thus include, for example, amino acids or analogs of amino acids other than the 20 naturally occurring amino acids and include, but are not limited to, the D-stereoisomers of amino acids. Exemplary non-natural amino acids are known to those of skill in the art, and include, but are not limited to, 2-Aminoadipic acid (Aad), 3-Aminoadipic acid (bAad), β-alanine/β-Amino-propionic acid (Bala), 2-Aminobutyric acid (Abu), 4-Aminobutyric acid/piperidinic acid (4Abu), 6-Aminocaproic acid (Acp), 2-Aminoheptanoic acid (Ahe), 2-Aminoisobutyric acid (Aib), 3-Aminoisobutyric acid (Baib), 2-Aminopimelic acid (Apm), 2,4-Diaminobutyric acid (Dbu), Desmosine (Des), 2,2′-Diaminopimelic acid (Dpm), 2,3-Diaminopropionic acid (Dpr), N-Ethylglycine (EtGly), N-Ethyl asparagine (EtAsn), Hydroxylysine (Hyl), allo-Hydroxylysine (Ahyl), 3-Hydroxyproline (3Hyp), 4-Hydroxyproline (4Hyp), Isodesmosine (Ide), allo-Isoleucine (Aile), N-Methylglycine, sarcosine (MeGly), N-Methylisoleucine (MeIle), 6-N-Methyllysine (MeLys), N-Methylvaline (MeVal), Norvaline (Nva), Norleucine (Nle), and Ornithine (Orn).

[0417] As used herein, a DNA construct is a single-stranded or double-stranded, linear or circular DNA molecule that contains segments of DNA combined and juxtaposed in a manner not found in nature. DNA constructs exist as a result of human manipulation, and include clones and other copies of manipulated molecules.

[0418] As used herein, a DNA segment is a portion of a larger DNA molecule having specified attributes. For example, a DNA segment encoding a specified polypeptide is a portion of a longer DNA molecule, such as a plasmid or plasmid fragment, which, when read from the 5′ to 3′ direction, encodes the sequence of amino acids of the specified polypeptide.

[0419] As used herein, the term polynucleotide means a single- or double-stranded polymer of deoxyribonucleotides or ribonucleotide bases read from the 5′ to the 3′ end. Polynucleotides include RNA and DNA, and can be isolated from natural sources, synthesized in vitro, or prepared from a combination of natural and synthetic molecules. The length of a polynucleotide molecule is given herein in terms of nucleotides (abbreviated “nt”), or base pairs (abbreviated “bp”). The term nucleotides is used for single- and double-stranded molecules where the context permits. When the term is applied to double-stranded molecules, it is used to denote overall length and will be understood to be equivalent to the term base pairs. It will be recognized by those skilled in the art that the two strands of a double-stranded polynucleotide can differ slightly in length and that the ends thereof can be staggered; thus, all nucleotides within a double-stranded polynucleotide molecule cannot be paired. Such unpaired ends will, in general, not exceed 20 nucleotides in length.

[0420] As used herein, “production by recombinant methods” refers to the use of the well-known methods of molecular biology for expressing proteins encoded by cloned DNA.

[0421] As used herein, “heterologous nucleic acid” is nucleic acid that encodes products (i.e., RNA and/or proteins) that are not normally produced in vivo by the cell in which it is expressed, or nucleic acid that is in a locus in which it does not normally occur, or that mediates or encodes mediators that alter expression of endogenous nucleic acid, such as DNA, by affecting transcription, translation, or other regulatable biochemical processes. Heterologous nucleic acid, such as DNA, also is referred to as foreign nucleic acid. Any nucleic acid, such as DNA, that one of skill in the art would recognize or consider as heterologous or foreign to the cell in which it is expressed, is herein encompassed by heterologous nucleic acid; heterologous nucleic acid includes exogenously added nucleic acid that is also expressed endogenously. Heterologous nucleic acid is generally not endogenous to the cell into which it is introduced, but has been obtained from another cell, or prepared synthetically, or is introduced into a genomic locus in which it does not occur naturally, or its expression is under the control of regulatory sequences or a sequence that differs from the natural regulatory sequence or sequences.

[0422] Examples of heterologous nucleic acid herein include, but are not limited to, nucleic acid that encodes a protein in a DNA/RNA sensor pathway or a gain-of-function or constitutively active variant thereof, or an immunostimulatory protein, such as a cytokine, chemokine or co-stimulatory molecule, that confers or contributes to anti-tumor immunity in the tumor microenvironment. Other products, such as antibodies and fragments thereof, BiTEs®, decoy receptors, antagonizing polypeptides and RNAi, that confer or contribute to anti-tumor immunity in the tumor microenvironment, also are included. In the immunostimulatory bacteria, the heterologous nucleic acid generally is encoded on the introduced plasmid, but it can be introduced into the genome of the bacterium, such as a promoter that alters expression of a bacterial product. Heterologous nucleic acid, such as DNA, includes nucleic acid that can, in some manner, mediate expression of DNA that encodes a therapeutic product, or it can encode a product, such as a peptide or RNA, that in some manner mediates, directly or indirectly, expression of a therapeutic product.

[0423] As used herein, cell therapy involves the delivery of cells to a subject to treat a disease or condition. The cells, which can be allogeneic or autologous to the subject, are modified ex vivo, such as by infection of cells with immunostimulatory bacteria provided herein, so that they deliver or express products when introduced to a subject.

[0424] As used herein, genetic therapy involves the transfer of heterologous nucleic acid, such as DNA, into certain cells, such as target cells, of a mammal, particularly a human, with a disorder or condition for which such therapy is sought. The nucleic acid, such as DNA, is introduced into the selected target cells in a manner such that the heterologous nucleic acid, such as DNA, is expressed, and a therapeutic product(s) encoded thereby is (are) produced. Genetic therapy can also be used to deliver nucleic acid encoding a gene product that replaces a defective gene or supplements a gene product produced by the mammal or the cell in which it is introduced. The introduced nucleic acid can encode a therapeutic compound, such as a growth factor or inhibitor thereof, or a tumor necrosis factor or inhibitor thereof, such as a receptor thereof, that is not normally produced in the mammalian host or that is not produced in therapeutically effective amounts or at a therapeutically useful time. The heterologous nucleic acid, such as DNA, encoding the therapeutic product, can be modified prior to introduction into the cells of the afflicted host in order to enhance or otherwise alter the product or expression thereof. Genetic therapy can also involve delivery of an inhibitor or repressor or other modulator of gene expression.

[0425] As used herein, “expression” refers to the process by which polypeptides are produced by transcription and translation of polynucleotides. The level of expression of a polypeptide can be assessed using any method known in art, including, for example, methods of determining the amount of the polypeptide produced from the host cell. Such methods can include, but are not limited to, quantitation of the polypeptide in the cell lysate by ELISA, Coomassie blue staining following gel electrophoresis, Lowry protein assay, and Bradford protein assay.

[0426] As used herein, a “host cell” is a cell that is used to receive, maintain, reproduce and/or amplify a vector. A host cell also can be used to express the polypeptide encoded by the vector. The nucleic acid contained in the vector is replicated when the host cell divides, thereby amplifying the nucleic acid.

[0427] As used herein, a “vector” is a replicable nucleic acid from which one or more heterologous proteins can be expressed when the vector is transformed into an appropriate host cell. Reference to a vector includes those vectors into which a nucleic acid encoding a polypeptide or fragment thereof can be introduced, typically by restriction digest and ligation. Reference to a vector also includes those vectors that contain nucleic acid encoding a polypeptide, such as a modified anti-CTLA-4 antibody. The vector is used to introduce the nucleic acid encoding the polypeptide into the host cell for amplification of the nucleic acid, or for expression/display of the polypeptide encoded by the nucleic acid. The vectors typically remain episomal, but can be designed to effect integration of a gene or portion thereof into a chromosome of the genome. Also contemplated are vectors that are artificial chromosomes, such as yeast artificial chromosomes and mammalian artificial chromosomes. Selection and use of such vehicles are well-known to those of skill in the art. A vector also includes “virus vectors” or “viral vectors.” Viral vectors are engineered viruses that are operatively linked to exogenous genes to transfer (as vehicles or shuttles) the exogenous genes into cells.

[0428] As used herein, an “expression vector” includes vectors capable of expressing DNA that is operatively linked with regulatory sequences, such as promoter regions, that are capable of effecting expression of such DNA fragments. Such additional segments can include promoter and terminator sequences, and optionally can include one or more origins of replication, one or more selectable markers, an enhancer, a polyadenylation signal, and the like. Expression vectors are generally derived from plasmid or viral DNA, or can contain elements of both. Thus, an expression vector refers to a recombinant DNA or RNA construct, such as a plasmid, a phage, recombinant virus or other vector that, upon introduction into an appropriate host cell, results in expression of the cloned DNA. Appropriate expression vectors are well-known to those of skill in the art and include those that are replicable in eukaryotic cells and/or prokaryotic cells and those that remain episomal or those which integrate into the host cell genome.

[0429] As used herein, “primary sequence” refers to the sequence of amino acid residues in a polypeptide, or the sequence of nucleotides in a nucleic acid molecule.

[0430] As used herein, “sequence identity” refers to the number of identical or similar amino acids or nucleotide bases in a comparison between a test and a reference poly-peptide or polynucleotide. Sequence identity can be determined by sequence alignment of nucleic acid or protein sequences to identify regions of similarity or identity. For purposes herein, sequence identity is generally determined by alignment to identify identical residues. The alignment can be local or global. Matches, mismatches and gaps can be identified between compared sequences. Gaps are null amino acids or nucleotides inserted between the residues of aligned sequences so that identical or similar characters are aligned. Generally, there can be internal and terminal gaps. When using gap penalties, sequence identity can be determined with no penalty for end gaps (e.g., terminal gaps are not penalized). Alternatively, sequence identity can be determined without taking into account gaps, as the number of identical positions/length of the total aligned sequence×100.

[0431] As used herein, a “global alignment” is an alignment that aligns two sequences from beginning to end, aligning each letter in each sequence only once. An alignment is produced, regardless of whether or not there is similarity or identity between the sequences. For example, 50% sequence identity based on “global alignment” means that in an alignment of the full sequence of two compared sequences each of 100 nucleotides in length, 50% of the residues are the same. It is understood that global alignment also can be used in determining sequence identity even when the length of the aligned sequences is not the same. The differences in the terminal ends of the sequences will be taken into account in determining sequence identity, unless the “no penalty for end gaps” is selected. Generally, a global alignment is used on sequences that share significant similarity over most of their length. Exemplary algorithms for performing global alignment include the Needleman-Wunsch algorithm (Needleman et al. (1970) J. Mol. Biol. 48:443-453). Exemplary programs for performing global alignment are publicly available and include the Global Sequence Alignment Tool available at the National Center for Biotechnology Information (NCBI) website (ncbi.nlm.nih.gov/), and the program available at deepc2.psi.iastate.edu/aat/align/align.html.

[0432] As used herein, a “local alignment” is an alignment that aligns two sequences, but only aligns those portions of the sequences that share similarity or identity. Hence, a local alignment determines if sub-segments of one sequence are present in another sequence. If there is no similarity, no alignment will be returned. Local alignment algorithms include BLAST, or the Smith-Waterman algorithm (Adv. Appl. Math. 2:482 (1981)). For example, 50% sequence identity based on “local alignment” means that in an alignment of the full sequence of two compared sequences of any length, a region of similarity or identity of 100 nucleotides in length has 50% of the residues that are the same in the region of similarity or identity.

[0433] For purposes herein, sequence identity can be determined by standard alignment algorithm programs used with default gap penalties established by each supplier. Default parameters for the GAP program can include: (1) a unary comparison matrix (containing a value of 1 for identities and 0 for non-identities) and the weighted comparison matrix of Gribskov et al. (1986) Nucl. Acids Res. 14:6745-6763, as described by Schwartz and Dayhoff, eds., Atlas of Protein Sequence and Structure, National Biomedical Research Foundation, pp. 353-358 (1979); (2) a penalty of 3.0 for each gap and an additional 0.10 penalty for each symbol in each gap; and (3) no penalty for end gaps. Whether any two nucleic acid molecules have nucleotide sequences, or any two polypeptides have amino acid sequences that are at least 80%, 85%, 90%, 95%, 96%, 97%, 98%, or 99% “identical,” or other similar variations reciting a percent identity, can be determined using known computer algorithms based on local or global alignment (see, e.g., wikipedia.org/wiki/Sequence alignment software, providing links to dozens of known and publicly available alignment databases and programs). Generally, for purposes herein sequence identity is determined using computer algorithms based on global alignment, such as the Needleman-Wunsch Global Sequence Alignment tool available from NCBI/BLAST (blast.ncbi.nlm.nih.gov/Blast.cgi?CMD=Web&Page TYPE=BlastHome); LAlign (William Pearson implementing the Huang and Miller algorithm (Adv. Appl. Math. (1991) 12:337-357)); and the program from Xiaoqui Huang, available at deepc2.psi.iastate.edu/aat/align/align.html. Typically, the full-length sequence of each of the compared polypeptides or nucleotides is aligned across the full-length of each sequence in a global alignment. Local alignment also can be used when the sequences being compared are substantially the same length.

[0434] Therefore, as used herein, the term “identity” represents a comparison or alignment between a test and a reference polypeptide or polynucleotide. In one non-limiting example, “at least 90% identical to” refers to percent identities from 90% to 100% relative to the reference polypeptide or polynucleotide. Identity at a level of 90% or more is indicative of the fact that, assuming for exemplification purposes a test and reference polypeptide or polynucleotide length of 100 amino acids or nucleotides are compared, no more than 10% (i.e., 10 out of 100) of amino acids or nucleotides in the test polypeptide or polynucleotide differ from those of the reference polypeptide or polynucleotide. Similar comparisons can be made between a test and reference polynucleotide. Such differences can be represented as point mutations randomly distributed over the entire length of an amino acid sequence, or they can be clustered in one or more locations of varying length up to the maximum allowable, e.g., 10/100, amino acid differences (approximately 90% identity). Differences also can be due to deletions or truncations of amino acid residues. Differences are defined as nucleic acid or amino acid substitutions, insertions, or deletions. Depending on the length of the compared sequences, at the level of homologies or identities above about 85-90%, the result can be independent of the program and gap parameters set; such high levels of identity can be assessed readily, often without relying on software.

[0435] As used herein, a “disease or disorder” refers to a pathological condition in an organism resulting from a cause or condition, including, but not limited to, infections, acquired conditions, and genetic conditions, and that is characterized by identifiable symptoms.

[0436] As used herein, “treating” a subject with a disease or condition means that the subject's symptoms are partially or totally alleviated, or remain static following treatment.

[0437] As used herein, “treatment” refers to any effects that ameliorate symptoms of a disease or disorder. Treatment encompasses prophylaxis, therapy and/or cure. Treatment also encompasses any pharmaceutical use of any immunostimulatory bacterium or composition provided herein.

[0438] As used herein, “prophylaxis” refers to prevention of a potential disease and/or a prevention of worsening of symptoms or of progression of a disease.

[0439] As used herein, “prevention” or prophylaxis, and grammatically equivalent forms thereof, refers to methods in which the risk or probability of developing a disease or condition is reduced.

[0440] As used herein, a “pharmaceutically effective agent” includes any therapeutic agent or bioactive agent, including, but not limited to, for example, anesthetics, vasoconstrictors, dispersing agents, and conventional therapeutic drugs, including small molecule drugs and therapeutic proteins.

[0441] As used herein, a “therapeutic effect” means an effect resulting from treatment of a subject that alters, typically improves or ameliorates, the symptoms of a disease or condition, or that cures a disease or condition.

[0442] As used herein, a “therapeutically effective amount” or a “therapeutically effective dose” refers to the quantity of an agent, compound, material, or composition containing a compound that is at least sufficient to produce a therapeutic effect following administration to a subject. Hence, it is the quantity necessary for preventing, curing, ameliorating, arresting, or partially arresting, a symptom of a disease or disorder.

[0443] As used herein, “therapeutic efficacy” refers to the ability of an agent, compound, material, or composition containing a compound to produce a therapeutic effect in a subject to whom the agent, compound, material, or composition containing a compound has been administered.

[0444] As used herein, a “prophylactically effective amount” or a “prophylactically effective dose” refers to the quantity of an agent, compound, material, or composition containing a compound that, when administered to a subject, will have the intended prophylactic effect, e.g., preventing or delaying the onset or reoccurrence, of disease or symptoms, reducing the likelihood of the onset or reoccurrence, of disease or symptoms, or reducing the incidence of viral infection. The full prophylactic effect does not necessarily occur by administration of one dose, and can occur only after administration of a series of doses. Thus, a prophylactically effective amount can be administered in one or more administrations.

[0445] As used herein, amelioration of the symptoms of a particular disease or disorder by a treatment, such as by administration of a pharmaceutical composition or other therapeutic, refers to any lessening, whether permanent or temporary, lasting or transient, of the symptoms, that can be attributed to or associated with administration of the composition or therapeutic.

[0446] As used herein, an “anti-cancer agent” or “an anti-cancer therapeutic” refers to any agent or therapeutic that is destructive or toxic, either directly or indirectly, to malignant cells and tissues. For example, anti-cancer agents include agents that kill cancer cells or otherwise inhibit or impair the growth of tumors or cancer cells.

[0447] Exemplary anti-cancer agents are chemotherapeutic agents, and immunotherapeutic agents.

[0448] As used herein, “therapeutic activity” refers to the in vivo activity of a therapeutic product, such as a polypeptide, a nucleic acid molecule, and other therapeutic molecules. Generally, the therapeutic activity is the activity that is associated with treatment of a disease or condition.

[0449] As used herein, the term “subject” refers to an animal, including a mammal, such as a human being.

[0450] As used herein, a patient refers to a human subject.

[0451] As used herein, “animal” includes any animal, such as, but not limited to, primates, including humans, gorillas and monkeys; rodents, such as mice and rats; fowl, such as chickens; ruminants, such as goats, cows, deer, and sheep; and pigs and other animals. Non-human animals exclude humans as the contemplated animal. The polypeptides provided herein are from any source, animal, plant, prokaryotic and fungal. Most polypeptides are of animal origin, including mammalian origin.

[0452] As used herein, a “composition” refers to any mixture. It can be a solution, suspension, liquid, powder, paste, aqueous, non-aqueous, or any combination thereof.

[0453] As used herein, a “combination” refers to any association between or among two or more items. The combination can be two or more separate items, such as two compositions or two collections, a mixture thereof, such as a single mixture of the two or more items, or any variation thereof. The elements of a combination are generally functionally associated or related.

[0454] As used herein, “combination therapy” refers to administration of two or more different therapeutics. The different therapeutic agents can be provided and administered separately, sequentially, intermittently, or can be provided in a single composition.

[0455] As used herein, a “kit” is a packaged combination that optionally includes other elements, such as additional reagents and instructions for use of the combination or elements thereof, for a purpose including, but not limited to, activation, administration, diagnosis, and assessment of a biological activity or property.

[0456] As used herein, a “unit dose form” refers to physically discrete units suitable for human and animal subjects and packaged individually, as is known in the art.

[0457] As used herein, a “single dosage formulation” refers to a formulation for direct administration.

[0458] As used herein, a “multi-dose formulation” refers to a formulation that contains multiple doses of a therapeutic agent and that can be directly administered to provide several single doses of the therapeutic agent. The doses can be administered over the course of minutes, hours, weeks, days, or months. Multi-dose formulations can allow dose adjustment, dose-pooling and/or dose-splitting. Because multi-dose formulations are used over time, they generally contain one or more preservatives to prevent microbial growth.

[0459] As used herein, an “article of manufacture” is a product that is made and sold. As used throughout this application, the term is intended to encompass any of the compositions provided herein contained in articles of packaging.

[0460] As used herein, a “fluid” refers to any composition that can flow. Fluids thus encompass compositions that are in the form of semi-solids, pastes, solutions, aqueous mixtures, gels, lotions, creams, and other such compositions.

[0461] As used herein, an isolated or purified polypeptide or protein (e.g., an isolated antibody or antigen-binding fragment thereof) or a biologically-active portion thereof (e.g., an isolated antigen-binding fragment), is substantially free of cellular material or other contaminating proteins from the cell or tissue from which the polypeptide or protein is derived, or substantially free from chemical precursors or other chemicals when chemically synthesized. Preparations can be determined to be substantially free if they appear free of readily detectable impurities as determined by standard methods of analysis, such as thin layer chromatography (TLC), gel electrophoresis and high performance liquid chromatography (HPLC), that are used by those of skill in the art to assess such purity, or are sufficiently pure such that further purification does not detectably alter the physical and chemical properties, such as enzymatic and biological activities, of the substance. Methods for purification of the compounds to produce substantially chemically pure compounds are known to those of skill in the art. A substantially chemically pure compound, however, can be a mixture of stereoisomers. In such instances, further purification might increase the specific activity of the compound.

[0462] As used herein, a “cellular extract” or “lysate” refers to a preparation or fraction which is made from a lysed or disrupted cell.

[0463] As used herein, a “control” refers to a sample that is substantially identical to the test sample, except that it is not treated with a test parameter, or, if it is a plasma sample, it can be from a normal volunteer not affected with the condition of interest. A control also can be an internal control.

[0464] As used herein, the singular forms “a,” “an” and “the” include plural referents unless the context clearly dictates otherwise. Thus, for example, reference to a polypeptide, comprising “an immunoglobulin domain” includes polypeptides with one or a plurality of immunoglobulin domains.

[0465] As used herein, the term “or” is used to mean “and/or” unless explicitly indicated to refer to alternatives only, or the alternatives are mutually exclusive.

[0466] As used herein, ranges and amounts can be expressed as “about” a particular value or range. “About” also includes the exact amount. Hence, “about 5 amino acids” means “about 5 amino acids” and also “5 amino acids.”

[0467] As used herein, “optional” or “optionally” means that the subsequently described event or circumstance does or does not occur, and that the description includes instances where said event or circumstance occurs and instances where it does not. For example, an optionally variant portion means that the portion is variant or non-variant.

[0468] As used herein, the abbreviations for any protective groups, amino acids and other compounds, are, unless indicated otherwise, in accord with their common usage, recognized abbreviations, or the IUPAC-IUB Commission on Biochemical Nomenclature (see, Biochem. (1972) 11(9):1726-1732).

[0469] For clarity of disclosure, and not by way of limitation, the detailed description is divided into the subsections that follow.

### B. Overview of Immunostimulatory Bacteria for Cancer Therapy

[0470] The recognition that bacteria have anti-cancer activity goes back to the 1800s, when several physicians observed the regression of tumors in patients infected with Streptococcus pyogenes. William Coley began the first study utilizing bacteria for the treatment of end-stage cancers, and developed a vaccine composed of S. pyogenes and Serratia marcescens, which was successfully used to treat a variety of cancers, including sarcomas, carcinomas, lymphomas and melanomas. Since then, a number of bacterial species, including Clostridium, Mycobacterium, Bifidobacterium, Listeria monocytogenes and Escherichia, have been studied as sources of anti-cancer vaccines (See, e.g., International PCT Application Publication Nos. WO 1999/013053 and WO 2001/025399; Bermudes et al. (2002) Curr. Opin. Drug Discov. Devel. 5:194-199; Patyar et al. (2010) Journal of Biomedical Science 17:21; and Pawlek et al. (2003) Lancet Oncol. 4:548-556).

[0471] As a therapeutic platform, bacteria have several advantages over other therapies such as oncolytic viruses. Some bacterial species can be engineered to be orally and systemically (intravenously; IV) administered, they propagate readily in vitro and in vivo, and they can be stored and transported in a lyophilized state. Bacterial chromosomes readily can be manipulated as they lack exons, and the complete genomes for numerous strains have been fully characterized (Felgner et al. (2016) mBio 7(5):e01220-16). Many types of bacteria are cheaper and easier to produce than viruses, and proper delivery of engineered bacteria can be favorable over viral delivery because they do not permanently integrate into host cell genomes, they preferentially infect myeloid cells over epithelial cells, and they can be rapidly eliminated by antibiotics if necessary, rendering them safe.

[0472] Provided herein are immunostimulatory bacteria that are modified to exploit these advantageous properties. The bacteria provided herein are modified so that they infect and accumulate in the tumor microenvironment, particularly in tumor-resident immune cells (myeloid cells), such as tumor-associated macrophages (TAMs), dendritic cells (DCs), and myeloid-derived suppressor cells (MDSCs), and also are designed to express and deliver high levels of therapeutic proteins and combinations, particularly complementary combinations, thereof. The immunostimulatory bacteria provided herein have advantageous properties that are superior to existing bacterial therapies, and also cell therapies, oncolytic virus therapies, and prior bacterial therapies. The immunostimulatory bacteria provided herein, while they can be administered by any suitable route, are suitable for systemic, such as intravenous, administration. As shown and described herein, the immunostimulatory bacteria provided herein can target major immune pathways.

[0473] The bacteria provided herein are designed and engineered to maintain the beneficial scaffold properties of bacteria, and to have a viral-like immune signature. This is advantageous for use as an anti-cancer therapeutic. The following table summarizes some of the immune and scaffold properties of bacteria and viruses; the immunostimulatory bacteria provided herein retain the feasibility of the bacterial scaffold, but result in a viral-like immune response in a treated subject (discussed in more detail in section C below).

| | | | Immunostimulatory |
|---|---|---|---|
| | | | Bacteria Provided |
| | Bacteria | Viruses | Herein |
| Feasibility as a | Easy to manufacture; | Difficult to manufacture; | Engineered to retain |
| Therapeutic | Stable Shelf Life; | Requires −80° C. for storage; | and improve feasibility |
| Scaffold | Easy to engineer; | Can be difficult to engineer; | properties |
| | Reversible with | Immunogenic; | |
| | antibiotics; | Complement can inactivate | |
| | Not immunogenic | | |
| Inflammatory | Recognized by TLR2, | Recognized by TLR3, | Engineered to produce |
| Profile | TLR4, and TLR5; | TLR7/8, and STING; | a viral-like immune |
| | Downstream targets | Downstream targets | response |
| | suppress adaptive | promote adaptive immunity | |
| | immunity | | |
| Chemokine | Attract neutrophils to | Attract T-cells to clear | |
| Gradients | clear infection | infection | |
| Generation of | No | Yes, but only to the virus | |
| durable | | | |
| immunity | | | |

[0474] In Salmonella species and other bacterial species, the flagella contribute to TRL5-mediated inflammation, the LPS results in TLR4-mediated inflammatory responses, and the adhesive curli fimbriae result in TLR2-mediated inflammatory responses. The genomes of the immunostimulatory bacteria provided herein are modified so that the bacteria lack flagella and adhesive curli fimbriae, and have modified LPS, resulting in the reduction or elimination of TLR4-mediated inflammatory responses. As a result, the immunostimulatory bacteria provided herein induce a viral-like anti-tumor immune response. Elimination or modification of these components confers other advantageous properties, such as those discussed in detail below. The immunostimulatory bacteria deliver therapeutic products, such as anti-cancer therapeutics, and particularly, complementary combinations of products. The immunostimulatory bacteria provided herein deliver encoded genetic payloads in a tumor-specific manner to tumor-resident myeloid cells.

[0475] Provided is an anti-cancer therapeutic product, an immunostimulatory bacterium, that delivers a genetic payload encoding one or a plurality of therapeutic products. Included is a truncated co-stimulatory molecule (receptor or ligand; e.g., 4-1BBL, CD80, CD86, CD27L, B7RP1, OX40L), with a complete or a partial cytoplasmic domain deletion, for expression on an antigen-presenting cell (APC), where the truncated gene product is capable of constitutive immunostimulatory signaling to a T-cell through co-stimulatory receptor engagement, and is unable to counter-regulatory signal to the APC due to a truncated or deleted cytoplasmic domain.

[0476] The immunostimulatory bacteria can encode and express one or more of IL-2, IL-7, IL-12p70 (IL-12p40+IL-12p35), IL-12, IL-15, IL-15/IL-15Ra chain complex, IL-18, IL-21, IL-23, IL-36γ, interferon-α, interferon-β, IL-2 that has attenuated binding to IL-2Ra, IL-2 that is modified so that it does not bind to IL-2Ra, CXCL9, CXCL10, CXCL11, CCL3, CCL4, CCL5, cytosolic DNA/RNA sensors or type I IFN pathway proteins, such as gain-of-function or constitutively active STING, IRF3, IRF7, MDA5, or RIG-I variants (that induce type I IFN), inhibitors of TGF-beta, such as TGF-β inhibitory antibodies, TGF-beta polypeptide antagonists, and TGF-beta binding decoy receptors, antibodies and fragments thereof, such as those targeting immune checkpoints and other anti-cancer targets, such as VEGF and IL-6, co-stimulatory receptors/molecules, such as 4-1BBL, including 4-1BBL with the cytoplasmic domain deleted or truncated or otherwise eliminated, and others. The immunostimulatory bacteria also can encode and express a truncated co-stimulatory molecule (e.g., 4-1BBL, CD80, CD86, CD27L, B7RP1, OX40L), with a partial or complete cytoplasmic domain deletion, for expression on an antigen-presenting cell (APC), where the truncated gene product is capable of constitutive immuno-stimulatory signaling to a T-cell through co-stimulatory receptor engagement, and is unable to counter-regulatory signal to the APC, due to a deleted or truncated cytoplasmic domain. Combinations of such therapeutic products and agents can be expressed in a single therapeutic composition. By virtue of the modifications of the bacterial genome, the immunostimulatory bacteria exhibit tumor-specific localization and enrichment, and provide intravenous (IV) administration for activation of anti-tumor immune pathways that are otherwise toxic if systemically activated.

[0477] The immunostimulatory bacteria provided herein are genetically designed to be safe and to target tumors, the tumor microenvironment, and/or tumor-resident immune cells. The immunostimulatory bacteria provided herein include a combination of genomic modifications and other modifications, as well as encoded therapeutic products, that function in concert to provide immunostimulatory bacteria that accumulate in tumor-resident immune cells and that persist sufficiently long to deliver therapeutic products, particularly combinations that induce or promote anti-cancer immune stimulation in tumors and the tumor microenvironment, without toxic side-effects, or with limited toxic side-effects. When delivered systemically, such as intravenously (IV), the immunostimulatory bacteria enrich in tumors, including in metastatic lesions; they provide efficient genetic transfer of immune payloads, specifically to tumor-resident myeloid cells, including tumor-associated macrophages (TAMs), myeloid-derived suppressor cells (MDSCs), and dendritic cells (DCs); they induce powerful, local immune responses, destroying tumors and vaccinating against future recurrence; and, when therapy is finished, they are naturally eliminated, such as by phagocytosis and destruction by the infected cells, or they can be destroyed rapidly by a course of antibiotics.

[0478] The immunostimulatory bacteria provided herein exhibit preferential accumulation in the tumor microenvironment and/or in tumor-resident immune cells due to a designed purine/adenosine auxotrophy, and exhibit an inability to replicate inside of phagocytic cells. Immunostimulatory bacteria that avoid inactivation by serum complement allow for the delivery of a variety of immunotherapeutic agents and therapeutic products at high concentrations, directly within the tumor microenvironment, while minimizing toxicity to normal tissues, and are provided herein.

[0479] For example, as described in more detail in section C.8., the immunostimulatory bacteria provided herein include modifications of the genome that render them msbB⁻/pagP⁻, which alters the lipid A in LPS, resulting in penta-acylation (wild-type lipid A has 6-7 fatty acid chains), reducing the TLR4 affinity; are adenosine/adenine auxotrophs, such as purI⁻, are asparaginase II (ansB⁻), which improves T-cell quality; are csgD⁻, which, among other properties, removes curli fimbriae; and include other optional genomic modifications, such as insertions, deletions, disruptions, and any other modification, so that the encoded product(s) is(are) not produced in active form, as discussed in detail herein. The immunostimulatory bacteria include a plasmid that encodes one or more therapeutic products, particularly anti-cancer products, under control of a eukaryotic promoter.

[0480] The immunostimulatory bacteria provided herein, that deliver therapeutic products (such as constitutively active STING variants and other immunomodulatory proteins and products), to the tumor-resident myeloid cells promote adaptive immunity and enhance T-cell function. The immunostimulatory bacteria lead to a complete remodeling of the immunosuppressive tumor microenvironment, towards an adaptive anti-tumor phenotype, and away from a bacterial phenotype, which is characterized by the promotion of innate immunity and the suppression of adaptive immunity.

[0481] The immunostimulatory bacteria provided herein include genomic modifications whereby they target or accumulate in tumor-resident immune cells, particularly tumor-resident myeloid cells, such as macrophages, MDSCs (myeloid-derived suppressor cells), and DCs (dendritic cells), in which they deliver payloads of encoded therapeutic products expressed under control of regulatory sequences recognized by the those cells' (eukaryotic) transcriptional/translational machinery. The encoded products are expressed in the myeloid cells, and, as appropriate, delivered into the tumor microenvironment. The bacteria generate anti-tumor immunity, and also can deliver anti-tumor products that directly treat tumors, and products that can activate prodrugs.

[0482] Immunostimulatory bacteria provided herein can exhibit significantly, such as at least about 100,000-fold, greater tumor infiltration and enrichment compared to unmodified bacteria. The immunostimulatory bacteria are consumed by tumor-resident immune cells, and deliver the plasmid encoding therapeutic products, which are expressed and produced in the immune cells and tumor microenvironment, to generate anti-tumor immunity.

[0483] 1. Bacterial Cancer Immunotherapy

[0484] Many solid tumor types have evolved a profoundly immunosuppressive microenvironment that renders them highly refractory to approved checkpoint therapies, such as anti-CTLA-4, anti-PD-1 and anti-PD-L1 therapies. One mechanism by which tumors have evolved resistance to checkpoint therapies is through their lack of intratumoral T-cells and tumor antigen cross-presenting dendritic cells (DCs), described as T-cell excluded, non-inflamed, or “cold tumors” (Sharma et al. (2017) Cell 168(4):707-723). For the small number of patients whose tumors are T-cell inflamed and respond to checkpoint immunotherapies, they often experience severe autoimmune toxicities, and many will eventually relapse and become checkpoint refractory (see, e.g., Buchbinder et al. (2015) J. Clin. Invest. 125:3377-3383; Hodi et al. (2010) N. Engl. J. Med. 363(8):711-723; and Chen et al. (2015) J. Clin. Invest. 125:3384-3391). Tumors initiate multiple mechanisms to evade immune surveillance, reprogram anti-tumor immune cells to suppress immunity, exclude and inactivate anti-tumor T-cells, and develop emerged resistance to the targeted cancer therapies (see, e.g., Mahoney et al. (2015) Nat. Rev. Drug Discov. 14(8):561-584). Solving this problem will require immunotherapies that can properly inflame these tumors, and generate anti-tumor immunity that can provide long-lasting tumor regressions. In addition, intratumoral therapies are intractable and will be quite limiting in a metastatic disease setting. Systemically-administered therapies that properly inflame each individual metastatic lesion and overcome multiple pathways of immunosuppression are required. By virtue of their ability to specifically target tumor-resident immune cells, and to express multiple complementary genetic payloads/therapeutic products, the immunostimulatory bacteria provided herein are designed to address these issues.

[0485] 2. Prior Therapies that Target the Tumor Microenvironment

[0486] A number of therapies that target the tumor microenvironment (TME) and attempt to promote anti-tumor immunity have been developed. Each has its own challenges and shortcomings, which are addressed by the immunostimulatory bacteria provided herein.

[0487] a. Limitations of Autologous T-Cell Therapies

[0488] Several systemically-administered therapeutic platforms have been investigated clinically, with the goal of accessing the highly immunosuppressive tumor microenvironment and inducing the proper immune responses to inflame tumors and promote anti-tumor immunity. These platforms include chimeric antigen receptors T-cells (CAR-T cells), which are produced by harvesting T-cells from patients and re-engineering them to fuse the T-cell receptor to an antibody Ig variable extracellular domain specific for a particular tumor antigen. This confers upon the cells the antigen-recognition properties of antibodies, with the cytolytic properties of activated T-cells (see, e.g., Sadelain et al. (2015) J. Clin. Invest. 125(9):3392-3400). Despite the promise and potency of this technology, such as the FDA approvals of the CD19 CAR-Ts tisagenlecleucel (such as those under the trademark Kymriah®) and axicabtagene ciloleucel (under the trademark Yescarta®), success has been limited to CD19⁺ hematopoietic malignancies, and at the cost of deadly immune-related adverse events (see, e.g., Jackson et al. (2016) Nat. Rev. Clin. Oncol. 13(6):370-383). Tumors can mutate rapidly to downregulate the targeted tumor antigens for solid tumors, including the antigen CD19, thereby fostering immune escape (see, e.g., Mardiana et al. (2019) Sci. Transl. Med. 11(495):eaaw2293). There is not a plethora of tumor-specific target antigens. Solid tumor targets that are not expressed in healthy tissue are a major impediment to CAR-T therapy. Beyond that, CAR-T therapies suffer from other impediments to accessing solid tumor microenvironments, due to the lack of sufficient T-cell chemokine gradients, which are required for proper T-cell infiltration into tumors. In addition, once they have infiltrated tumors, they are rapidly inactivated (see, e.g., Brown et al. (2019) Nat. Rev. Immunol. 19(2):73-74). Should the safety of CAR-T cells be significantly improved and the efficacy expanded to solid tumors, the feasibility and costs associated with these labor-intensive therapies still limit their broader adoption.

[0489] b. Viral Vaccine Platforms

[0490] Oncolytic viruses (OVs) have natural and engineered properties to induce tumor cell lysis, recruit T-cells to the tumor, and deliver genetic material that can be read by tumor cells to produce immunomodulatory proteins. For example, the oncolytic virus designated Talimogene laherparepvec (T-VEC), is a modified herpes simplex virus encoding anti-melanoma antigens and the cytokine GM-CSF (granulocyte-macrophage colony-stimulating factor), that is intratumorally administered. It is FDA-approved for metastatic melanoma (see, e.g., Bastin et al. (2016) Biomedicines 4(3):21). T-VEC has demonstrated clinical benefit for some melanoma patients, and with fewer immune toxicities than the immune checkpoint antibodies or the FDA-approved systemic cytokines, such as IL-2 and interferon-alpha (see, e.g., Kim et al. (2006) Cytokine Growth Factor Rev. 17(5):349-366; and Paul et al. (2015) Gene 567(2):132-137).

[0491] Oncolytic viruses (OVs) possess a number of limitations as anti-cancer therapies. First, oncolytic viruses are rapidly inactivated by the human complement system in blood. It has proven difficult to deliver enough virus through systemic administration to have a desired therapeutic effect. Intratumoral delivery is limiting in a metastatic setting (where lesions are spread throughout the body), is intractable for most solid tumor types (e.g., lung and visceral lesions), and requires interventional, guided radiology for injection, which limits repeat dosing. Viruses can be difficult to manufacture at commercial scale and to store. Most OV-based vaccines, such as those based on paramyxovirus, reovirus and picornavirus, among others, have similar limitations (see, e.g., Chiocca et al. (2014) Cancer Immunol. Res. 2(4):295-300). Oncolytic viruses are inherently immunogenic and rapidly cleared from human blood, and T-cells that traffic into the tumor have a much higher affinity for viral antigens over weaker tumor neoantigens (see, e.g., Aleksic et al. (2012) Eur. J. Immunol. 42(12):3174-3179). Thus, in addition to the recognized technical limitations of the platform, OVs thus far have limited capacity to stimulate durable anti-tumor immunity.

[0492] c. Bacterial Cancer Therapies

[0493] A number of bacterial species have demonstrated preferential replication within solid tumors when injected from a distal site in preclinical animal studies. These include, but are not limited to, species of Salmonella, Bifidobacterium, Clostridium, and Escherichia. The tumor-homing properties of the bacteria, combined with the host's innate immune response to the bacterial infection, can mediate an anti-tumor response. This tumor tissue tropism reduces the size of tumors to varying degrees. One contributing factor to the tumor tropism of these bacterial species is the ability to replicate in anoxic and hypoxic environments. A number of these naturally tumor-tropic bacteria have been further engineered to increase the potency of the anti-tumor response (reviewed in Zu et al. (2014) Crit. Rev. Microbiol. 40(3):225-235; and Felgner et al. (2017) Microbial Biotechnology 10(5):1074-1078). Despite proof-of-concept in animal studies, complement factors in human serum, that are not present in animal models, can inactivate the bacteria, limiting their use as therapies to treat cancer.

[0494] To be administered orally or systemically, the bacterial strains are attenuated so that they do not cause systemic disease and/or septic shock, but still maintain some level of infectivity for effective tumor colonization, and resistance to inactivation by complement. A number of different bacterial species, including Clostridium (see, e.g., Dang et al. (2001) Proc. Natl. Acad. Sci. U.S.A. 98(26):15155-15160; U.S. Patent Publication Nos. 2017/0020931 and 2015/0147315; and U.S. Pat. Nos. 7,344,710 and 3,936,354), Mycobacterium (see, e.g., U.S. Patent Publication Nos. 2015/0224151 and 2015/0071873), Bifidobacterium (see, e.g., Dang et al. (2001); and Kimura et al. (1980) Cancer Res. 40:2061-2068), Lactobacillus (see, e.g., Dang et al. (2001)), Listeria monocytogenes (see, e.g., Le et al. (2012) Clin. Cancer Res. 18(3):858-868; Starks et al. (2004) J. Immunol. 173:420-427; and U.S. Patent Publication No. 2006/0051380) and Escherichia coli (see, e.g., U.S. Pat. No. 9,320,787), have been studied as possible agents for anti-cancer therapy.

[0495] The immunostimulatory bacteria provided herein include genome modifications that address problems with prior bacteria developed for treating tumors. The modifications improve the targeting or accumulation of bacteria in the tumor microenvironment, and in particular, are designed so that the bacteria infect tumor-resident immune cells and not healthy tissues, thereby decreasing toxicity and improving delivery of encoded products. The immunostimulatory bacteria also are designed to deliver therapeutic products, including combinations thereof, designed to eliminate immune suppressive effects of tumors, enhance a host's anti-tumor response, and provide anti-tumor products.

[0496] i. Listeria

[0497] Listeria monocytogenes, a live attenuated intracellular bacterium capable of inducing potent CD8⁺ T-cell priming to expressed tumor antigens in mouse models of cancer, has also been explored as a bacterial cancer vector (see, e.g., Le et al. (2012) Clin. Cancer Res. 18(3):858-868). In a clinical trial of the L. monocytogenes-based vaccine incorporating the tumor antigen mesothelin, together with an allogeneic pancreatic cancer-based GVAX vaccine in a prime-boost approach, a median survival of 6.1 months was noted in patients with advanced pancreatic cancer, versus a median survival of 3.9 months for patients treated with the GVAX vaccine alone (see, e.g., Le et al. (2015) J. Clin. Oncol. 33(12):1325-1333). These results were not replicated in a larger phase 2b study, however, pointing to the difficulties in humans of subverting peripheral immune surveillance towards low affinity tumor neoantigens. L. monocytogenes also has shown limited immune responses to the encoded tumor antigens due to the requirement for bacteria to be lysed after phagocytosis, a pre-requisite to efficient plasmid transfer, which has not been demonstrated to occur by L. monocytogenes in human macrophages.

[0498] ii. Salmonella Species

[0499] Salmonella enterica serovar Typhimurium (S. typhimurium) is exemplary of a bacterial species for use as an anti-cancer therapeutic. S. typhimurium is a Gram-negative facultative anaerobe, which preferentially accumulates in hypoxic and necrotic areas due to the availability of nutrients from tissue necrosis, the leaky tumor vasculature, and their increased likelihood to survive in the immunosuppressed tumor microenvironment (see, e.g., Baban et al. (2010) Bioengineered Bugs 1(6):385-394). As a facultative anaerobe, S. typhimurium is able to grow under aerobic and anaerobic conditions, and is therefore able to colonize both small tumors that are less hypoxic, and large tumors that are more hypoxic.

[0500] S. typhimurium transmission through the fecal-oral route causes localized gastrointestinal infections. The bacterium can also enter the bloodstream and lymphatic system, infecting systemic tissues such as the liver, spleen and lungs. Systemic administration of wild-type S. typhimurium overstimulates TNF-α and IL-6, leading to a cytokine cascade and septic shock, which, if left untreated, can be fatal. As a result, pathogenic bacterial strains, such as S. typhimurium, must be attenuated to prevent systemic infection, without completely suppressing their ability to effectively colonize tumor tissues. Attenuation often is achieved by mutating a cellular structure that can elicit an immune response through pathogen pattern recognition, such as the bacterial outer membrane, or by limiting the bacterium's ability to replicate in the absence of supplemental nutrients.

[0501] S. typhimurium is an intracellular pathogen that is rapidly taken up by phagocytic myeloid cells such as macrophages, or it can directly invade non-phagocytic cells, such as epithelial cells, through its Salmonella pathogenicity island 1 (SPI-1)-encoded type III secretion system (T3SS1). Once inside cells, it can replicate within a Salmonella-containing vacuole (SCV) through SPI-2 regulation, and can also escape into the cytosol of some epithelial cells (see, e.g., Agbor et al. (2011) Cell Microbiol. 13(12):1858-1869; and Galan and Wolf-Watz (2006) Nature 444:567-573). Genetically modified bacterial strains of S. typhimurium have been described as anti-tumor agents to elicit direct tumoricidal effects and/or to deliver tumoricidal molecules (see, e.g., Clairmont et al. (2000) J. Infect. Dis. 181:1996-2002; Bermudes, D. et al. (2002) Curr. Opin. Drug Discov. Devel. 5:194-199; Zhao, M. et al. (2005) Proc. Natl. Acad. Sci. U.S.A. 102:755-760; and Zhao, M. et al. (2006) Cancer Res. 66:7647-7652).

[0502] Various methods for attenuation of bacterial pathogens are known in the art. Auxotrophic mutations, for example, render bacteria incapable of synthesizing an essential nutrient, and deletions/mutations in genes such as aro, pur, gua, thy, nad and asd (see, e.g., U.S. Patent Publication No. 2012/0009153) are used. Nutrients produced by the biosynthesis pathways involving these genes are often unavailable in host cells, and as such, bacterial survival is challenging. For example, attenuation of Salmonella and other species can be achieved by deletion or disruption of the aroA gene, which is part of the shikimate pathway, connecting glycolysis to aromatic amino acid biosynthesis (see, e.g., Felgner et al. (2016) mBio 7(5):e01220-16). Deletion or disruption of aroA results in bacterial auxotrophy for aromatic amino acids and subsequent attenuation (see, e.g., U.S. Patent Publication Nos. 2003/0170276, 2003/0175297, 2012/0009153 and 2016/0369282; and International Application Publication Nos. WO 2015/032165 and WO 2016/025582). Similarly, other enzymes involved in the biosynthesis pathway for aromatic amino acids, including aroC and aroD, have been deleted to achieve attenuation (see, e.g., U.S. Patent Publication No. 2016/0369282; and International Application Publication No. WO 2016/025582). For example, S. typhimurium strain SL7207 is an aromatic amino acid auxotroph (aroA⁻ mutant), and strains A1 and A1-R are leucine-arginine auxotrophs.

[0503] Mutations that attenuate bacteria also include, but are not limited to, mutations in genes that alter the biosynthesis of lipopolysaccharide (LPS), such as rfaL, rfaG, rfaH, rfaD, rfaP, rFb, rfa, msbB, htrB, firA, pagL, pagP, lpxR, arnT, eptA, and lpxT; mutations that introduce a suicide gene, such as sacB, nuk, hok, gef, kil, or phlA; mutations that introduce a bacterial lysis gene, such as hly and cly; mutations in genes that encode virulence factors, such as IsyA, pag, prg, iscA, virG, plc, and act; mutations in genes that modify the stress response, such as recA, htrA, htpR, hsp, and groEL; mutations in genes that disrupt the cell cycle, such as min; and mutations in genes that disrupt or inactivate regulatory functions, such as cya, crp, phoP/phoQ, and ompR (see, e.g., U.S. Patent Publication Nos. 2012/0009153, 2003/0170276, and 2007/0298012; U.S. Pat. No. 6,190,657; International Application Publication No. WO 2015/032165; Felgner et al. (2016) Gut Microbes 7(2):171-177; Broadway et al. (2014) J. Biotechnology 192:177-178; Frahm et al. (2015) mBio 6(2):e00254-15; Kong et al. (2011) Infection and Immunity 79(12):5027-5038; and Kong et al. (2012) Proc. Natl. Acad. Sci. U.S.A. 109(47):19414-19419). In general, attenuating mutations are gene deletions to prevent spontaneous compensatory mutations that might result in reversion to a virulent phenotype.

[0504] Another way to attenuate S. typhimurium for safety is to use the PhoP/PhoQ operon system, which is a typical bacterial two-component regulatory system, composed of a membrane-associated sensor kinase (PhoQ), and a cytoplasmic transcriptional regulator (PhoP) (see, e.g., Miller, S. I. et al. (1989) Proc. Natl. Acad. Sci. U.S.A. 86:5054-5058; and Groisman, E. A. et al. (1989) Proc. Natl. Acad. Sci. U.S.A. 86:7077-7081). PhoP/PhoQ is required for virulence; its deletion results in poor survival of this bacterium in macrophages, and a marked attenuation in mice and humans (see, e.g., Miller, S. I. et al. (1989) Proc. Natl. Acad. Sci. U.S.A. 86:5054-5058; Groisman, E. A. et al. (1989) Proc. Natl. Acad. Sci. U.S.A. 86:7077-7081; Galan, J. E. and Curtiss, R. III. (1989) Microb. Pathog. 6:433-443; and Fields, P. I. et al. (1986) Proc. Natl. Acad. Sci. U.S.A. 83:5189-5193). PhoP/PhoQ deletion strains have been employed as vaccine delivery vehicles (see, e.g., Galan, J. E. and Curtiss, R. III. (1989) Microb. Pathog. 6:433-443; Fields, P. I. et al. (1986) Proc. Natl. Acad. Sci. U.S.A. 83:5189-5193; and Angelakopoulos, H. and Hohmann, E. L. (2000) Infect. Immun. 68:2135-2141). As described herein, however, it is disadvantageous for a strain to have limited survival in macrophages if the bacteria are not attempting to transfer plasmids.

[0505] These attenuated bacterial strains have been found to be safe in mice, pigs, and monkeys when administered intravenously (IV) (see, e.g., Zhao, M. et al. (2005) Proc. Natl. Acad. Sci. U.S.A. 102:755-760; Zhao, M. et al. (2006) Cancer Res. 66:7647-7652; Tjuvajev J. et al. (2001) J. Control. Release 74:313-315; and Zheng, L. et al. (2000) Oncol. Res. 12:127-135), and certain live attenuated Salmonella strains have been shown to be well tolerated after oral administration in human clinical trials (see, e.g., Chatfield, S. N. et al. (1992) Biotechnology 10:888-892; DiPetrillo, M. D. et al. (1999) Vaccine 18:449-459; Hohmann, E. L. et al. (1996) J. Infect. Dis. 173:1408-1414; and Sirard, J. C. et al. (1999) Immunol. Rev. 171:5-26). Other strains of S. typhimurium that have been attenuated for therapy are, for example, the leucine-arginine auxotroph A-1 (see, e.g., Zhao et al. (2005) Proc. Natl. Acad. Sci. U.S.A. 102(3):755-760; Yu et al. (2012) Scientific Reports 2:436; U.S. Pat. No. 8,822,194; and U.S. Patent Publication No. 2014/0178341), and its derivative AR-1 (see, e.g., Yu et al. (2012) Scientific Reports 2:436; Kawaguchi et al. (2017) Oncotarget 8(12):19065-19073; Zhao et al. (2006) Cancer Res. 66(15):7647-7652; Zhao et al. (2012) Cell Cycle 11(1):187-193; Tome et al. (2013) Anticancer Research 33:97-102; Murakami et al. (2017) Oncotarget 8(5):8035-8042; Liu et al. (2016) Oncotarget 7(16):22873-22882; and Binder et al. (2013) Cancer Immunol. Res. 1(2):123-133); the aroA⁻ mutant S. typhimurium strain SL7207 (see, e.g., Guo et al. (2011) Gene Therapy 18:95-105; and U.S. Patent Publication Nos. 2012/0009153, 2016/0369282 and 2016/0184456), and its obligate anaerobe derivative YB1 (see, e.g., International Application Publication No. WO 2015/032165; Yu et al. (2012) Scientific Reports 2:436; and Leschner et al. (2009) PLoS ONE 4(8):e6692); the aroA⁻/aroD⁻ mutant S. typhimurium strain BRD509, a derivative of the SL1344 (wild-type) strain (see, e.g., Yoon et al. (2017) Eur. J. Cancer 70:48-61); the asd⁻/cya⁻/crp⁻ mutant S. typhimurium strain χ4550 (see, e.g., Sorenson et al. (2010) Biologics: Targets & Therapy 4:61-73) and the phoP⁻/phoQ⁻S. typhimurium strain LH430 (see, e.g., International Application Publication No. WO 2008/091375).

[0506] Attenuation, however, impacts the ability of the bacteria to accumulate in tumor-resident immune cells, the tumor microenvironment, and tumor cells. This problem is solved herein. The immunostimulatory bacteria, such as the Salmonella strains exemplified herein, are attenuated by virtue of modifications, that can include some of those described above, but also have other modifications and properties described herein that enhance the effectiveness as a cancer therapeutic.

[0507] Attenuated strains of S. typhimurium possess the innate ability to deliver DNA following phagocytosis and degradation (see, e.g., Weiss et al. (2003) Int. J. Med. Microbiol. 293(1):95-106). They have been used as vectors for gene therapy. For example, S. typhimurium strains have been used to deliver and express a variety of genes, including those that encode cytokines, angiogenesis inhibitors, toxins, and prodrug-converting enzymes (see, e.g., U.S. Patent Publication No. 2007/0298012; Loeffler et al. (2008) Cancer Gene Ther. 15(12):787-794; Loeffler et al. (2007) Proc. Natl. Acad. Sci. U.S.A. 104(31):12879-12883; Loeffler et al. (2008) J. Natl. Cancer Inst. 100:1113-1116; Clairmont, C. et al. (2000) J. Infect. Dis. 181:1996-2002; Bermudes, D. et al. (2002) Curr. Opin. Drug Discov. Devel. 5:194-199; Zhao, M. et al. (2005) Proc. Natl. Acad. Sci. U.S.A. 102:755-760; Zhao, M. et al. (2006) Cancer Res. 66:7647-7652; and Tjuvajev J. et al. (2001) J. Control. Release 74:313-315).

[0508] S. typhimurium has been modified to deliver the tumor-associated antigen (TAA) survivin (SVN) to antigen-presenting cells (APCs) to prime adaptive immunity (see, e.g., U.S. Patent Publication No. 2014/0186401; and Xu et al. (2014) Cancer Res. 74(21):6260-6270). SVN is an inhibitor of apoptosis protein (TAP), which prolongs cell survival and provides cell cycle control, and is overexpressed in all solid tumors and poorly expressed in normal tissues. This technology uses SPI-2 and its type III secretion system to deliver the TAAs into the cytosol of APCs, which then are activated to induce TAA-specific CD8⁺ T-cells and anti-tumor immunity (see, e.g., Xu et al. (2014) Cancer Res. 74(21):6260-6270). Similar to the Listeria-based TAA vaccines, this approach has shown promise in mouse models, but has not demonstrated effective tumor antigen-specific T-cell priming in humans.

[0509] In addition to the delivery of DNA that encodes proteins, S. typhimurium also has been used for the delivery of small interfering RNAs (siRNAs) and short hairpin RNAs (shRNAs) for cancer therapy. For example, attenuated S. typhimurium has been modified to express certain shRNAs, such as those that target the immunosuppressive gene indolamine dioxygenase (IDO). Silenced IDO expression in a murine melanoma model resulted in tumor cell death and significant tumor infiltration by neutrophils (see, e.g., Blache et al. (2012) Cancer Res. 72(24):6447-6456; International Application Publication No. WO 2008/091375; and U.S. Pat. No. 9,453,227). Co-administration of this vector with a hyaluronidase showed positive results in the treatment of murine pancreatic ductal adenocarcinoma (see, e.g., Manuel et al. (2015) Cancer Immunol. Res. 3(9):1096-1107; and U.S. Patent Publication No. 2016/0184456). In another study, an S. typhimurium strain attenuated by a phoP/phoQ deletion, and expressing a signal transducer and activator of transcription 3 (STAT3)-specific shRNA, inhibited tumor growth and reduced the number of metastatic organs, extending the life of C57BL/6 mice (see, e.g., Zhang et al. (2007) Cancer Res. 67(12):5859-5864). In another example, S. typhimurium strain SL7207 has been used for the delivery of shRNA targeting CTNNB1, the gene that encodes β-catenin (see, e.g., Guo et al. (2011) Gene Therapy 18:95-105; and U.S. Patent Publication Nos. 2009/0123426 and 2016/0369282). The S. typhimurium strain VNP20009 has been used for the delivery of shRNA targeting STAT3 (see, e.g., Manuel et al. (2011) Cancer Res. 71(12):4183-4191; U.S. Patent Publication Nos. 2009/0208534, 2014/0186401 and 2016/0184456; and International Application Publication Nos. WO 2008/091375 and WO 2012/149364). siRNAs targeting the autophagy genes Atg5 and Beclin1 have been delivered to tumor cells using S. typhimurium strains A1-R and VNP20009 (see, e.g., Liu et al. (2016) Oncotarget 7(16):22873-22882).

[0510] It has been found, however, that these strains do not effectively stimulate an anti-tumor immune response, nor effectively colonize tumors for delivery of therapeutic doses of encoded products. Improvement of such strains is needed so that they more effectively stimulate an anti-tumor immune response, such as the immunostimulatory bacteria provided herein. Further and alternative modifications of various bacteria have been described in published International PCT Application No. WO 2019/014398 and in U.S. Publication No. 2019/0017050 A1. The bacteria described in each of these publications, also described herein, can be modified as described herein to further improve their immunostimulatory and tumor-targeting properties.

[0511] iii. VNP20009

[0512] Exemplary of a therapeutic bacterium that can be used as a starting strain for modification as described herein is the strain designated as VNP20009 (ATCC #202165, YS1646). This virus was a clinical candidate. VNP20009 (ATCC #202165, YS1646) was at least 50,000-fold attenuated for safety by deletion of the msbB and purI genes (see, e.g., Clairmont et al. (2000) J. Infect. Dis. 181:1996-2002; Low et al. (2003) Methods in Molecular Medicine, Vol. 90, Suicide Gene Therapy: Methods and Reviews, pp. 47-59; and Lee et al. (2000) International Journal of Toxicology 19:19-25). Deletion or disruption to prevent expression of the msbB gene alters the composition of the lipid A domain of lipopolysaccharide, the major component of Gram-negative bacterial outer membranes (see, e.g., Low et al. (1999) Nat. Biotechnol. 17(1):37-41). This prevents lipopolysaccharide-induced septic shock, attenuating the bacterial strain and lowering systemic toxicity, while reducing the potentially harmful production of TNFα (see, e.g., Dinarello, C. A. (1997) Chest 112(6 Suppl):321S-329S; and Low et al. (1999) Nat. Biotechnol. 17(1):37-41). Deletion or disruption to prevent expression of the purI gene renders the bacteria auxotrophic for purines, which further attenuates the bacteria and enriches them in the tumor microenvironment (see, e.g., Pawelek et al. (1997) Cancer Res. 57:4537-4544; and Broadway et al. (2014) J. Biotechnology 192:177-178). As shown herein, VNP20009 also is auxotrophic for the immunosuppressive nucleoside adenosine. Adenosine can accumulate to pathologically high levels in the tumor and contribute to an immunosuppressive tumor microenvironment (see, e.g., Peter Vaupel and Arnulf Mayer, Oxygen Transport to Tissue X XXVII, Advances in Experimental Medicine and Biology 876 chapter 22, pp. 177-183).

[0513] When VNP20009 was administered into mice bearing syngeneic or human xenograft tumors, the bacteria accumulated preferentially within the extracellular components of tumors at ratios exceeding 300-1000 to 1, and demonstrated tumor growth inhibition, as well as prolonged survival compared to control mice (see, e.g., Clairmont et al. (2000) J. Infect. Dis. 181:1996-2002). VNP20009 demonstrated success in tumor targeting and tumor growth suppression in animal models, while eliciting very little toxicity (see, e.g., Broadway et al. (2014) J. Biotechnology 192:177-178; Loeffler et al. (2007) Proc. Natl. Acad. Sci. U.S.A. 104(31): 12879-12883; Luo et al. (2002) Oncology Research 12:501-508; and Clairmont et al. (2000) J. Infect. Dis. 181:1996-2002).

[0514] Results from the Phase 1 clinical trial in human metastatic melanoma revealed that, while VNP20009 was relatively safe and well tolerated, very limited anti-tumor activity was observed (see, e.g., Toso et al. (2002) J. Clin. Oncol. 20(1):142-152). While the use of VNP20009 resulted in no significant changes in metastatic disease burden, it did demonstrate evidence of tumor colonization at the maximum tolerated dose (MTD). Higher doses, which would be required to effect any anti-tumor activity, were not possible due to toxicity that correlated with high levels of pro-inflammatory cytokines.

[0515] The immunostimulatory bacteria provided herein provide numerous improvements and advantages that strain VNP20009 lacks. The immunostimulatory bacteria deliver encoded genetic payloads in a tumor-specific manner, to tumor-resident myeloid cells. The immunostimulatory bacteria, by virtue of genomic modifications, such as deletions or disruptions of genes, and other modifications of the genome, exhibit reduced TLR2-, TLR4-, and TLR5-mediated inflammation, for example, by virtue of the elimination of the flagella, the modifications of the LPS, and the elimination of the curli fimbriae and reduced biofilm formation. The immunostimulatory bacteria enhance T-cell function, such as by virtue of the elimination of the expression of L-asparaginase II, and facilitate, provide, permit, and support plasmid maintenance. The bacteria accumulate in (or target) only, or substantially only, myeloid cells, particularly tumor-resident myeloid cells, providing highly efficient plasmid delivery after phagocytosis. The immunostimulatory bacteria provided herein colonize the tumor microenvironment, and can be administered systemically. The immunostimulatory bacteria provided herein exhibit at least 15-fold improved LD₅₀ compared to VNP20009. Thus, a much higher dose, if needed, of the immunostimulatory bacteria provided herein can be administered without toxic effects, compared to VNP20009 (see, the table below in the section F.5. describing dosages and administration).

[0516] It is shown and described herein that immunostimulatory bacteria modified as described herein, including elimination of flagella, LPS modifications, and other modifications, preferentially accumulate in or target myeloid cells, particularly tumor-resident myeloid cells. The Examples demonstrate that the immunostimulatory bacteria accumulate in such cells following systemic, such as intravenous, administration. The Examples also describe and show plasmid transfer from the immunostimulatory bacteria into tumor-resident myeloid cells, and durable protein expression following bacterial cell death, thereby delivering therapeutic products, including products that result in an anti-cancer response and phenotype.

[0517] iv. Wild-Type Strains

[0518] Accumulation of VNP20009 in tumors results from a combination of factors including: the inherent invasiveness of the parental strain, ATCC 14028, its ability to replicate in hypoxic environments, and its requirement for high concentrations of purines that are present in the interstitial fluid of tumors. As described herein, it is not necessary to use an attenuated strain, such as VNP20009, as a starting bacterial strain. By virtue of the modifications described herein, the bacteria are rendered non-toxic or attenuated. The parental strain, ATCC 14028, or another wild-type strain, can be used as a starting strain, and modified as described herein.

[0519] 3. Limitations of Existing Bacterial Cancer Immunotherapies

[0520] Many classes of immunotherapies have significant limitations that limit their safety and efficacy, as well as complicated platforms that are not likely to be widely used. Bacteria have numerous advantageous properties for use as anti-cancer therapeutics, compared to, for example, oncolytic viruses. These include the ease with which they can be propagated, manufactured, stored, and eliminated from a host when treatment is completed. Viruses, however, also have advantageous properties, including the host response. The response to a bacterial infection is an innate inflammatory response, which is not advantageous for an anti-cancer therapeutic. The response to a viral infection is similar to an anti-cancer response. This is summarized in the following table (see, also, the Overview, above):

| | Bacteria | Viruses |
|---|---|---|
| Innate | TLR2, TLR4 and TLR5 | TLR3, TLR7/8, and STING |
| Recognition by: | | |
| Inflammatory | Promote innate | Promote innate immunity; |
| Cytokine Profile: | immunity; Suppress | Promote adaptive immunity |
| | adaptive immunity | |
| Chemokine | Attract neutrophils to | Attract T-cells, monocytes |
| Gradients: | clear infection | to clear infection |
| Generation of | No | Yes |
| Immunity: | | |
| Immunogenicity: | Not immunogenic | Highly immunogenic |

[0521] A limitation of bacteria as a microbial anti-cancer platform, thus, derives from the specific immune program that is initiated upon sensing of bacteria, even intracellular bacteria, by the immune system, compared to viral-sensing pathways, which are more akin to anti-cancer pathways. The sensing programs that recognize viruses permit the generation of highly effective vaccines and durable adaptive immunity. Vaccinating against bacteria, however, has been met with limited success. For example, the FDA-approved vaccine for typhoid fever against Salmonella typhi is only 55% effective (see, e.g., Hart et al. (2016) PLoS ONE 11(1):e0145945), despite S. typhi containing a highly immunogenic Vi capsule and 0:9 antigen, which do not occur in less immunogenic bacterial strains, such as L. monocytogenes and S. typhimurium, against which there are no vaccines.

[0522] Bacteria and viruses contain conserved structures known as Pathogen-Associated Molecular Patterns (PAMPs), which are sensed by host cell Pattern Recognition Receptors (PRRs). Recognition of PAMPs by PRRs triggers downstream signaling cascades that result in the induction of cytokines and chemokines, and initiation of a specific immune response (see, e.g., Iwasaki and Medzhitov (2010) Science 327(5963):291-295). The manner in which the innate immune system is engaged by PAMPs, and from what type of infectious agent, determines whether an appropriate innate or adaptive response is generated to combat the invading pathogen.

[0523] A class of PRRs, known as Toll-Like Receptors (TLRs), recognize PAMPs derived from bacterial and viral origins, and are located in various compartments within the cell. TLRs recognize a variety of ligands, including lipopolysaccharide (TLR4), lipoproteins (TLR2), flagellin (TLR5), unmethylated CpG motifs in DNA (TLR9), double-stranded RNA (TLR3), and single-stranded RNA (TLR7 and TLR8) (see, e.g., Akira et al. (2001) Nat. Immunol. 2(8):675-680; and Kawai and Akira (2005) Curr. Opin. Immunol. 17(4):338-344). DNA and RNA-based viruses can be sensed either in host cytosolic compartments after phagocytosis, or directly in the cytosol. Type I interferons (IFN-α, IFN-β) are the signature cytokines induced by host recognition of single-stranded and double-stranded DNA and RNA, either of viral origin, or from the uptake of damaged host cell DNA. For example, the synthetic dsRNA analog polyinosinic:polycytidylic acid (poly(I:C)) is an agonist for endosomal TLR3 and a powerful inducer of type I IFN, and its more stable version, poly ICLC (such as that sold under the trademark Hiltonol®), has been in clinical development (see, e.g., Caskey et al. (2011) J. Exp. Med. 208(12):2357-2366). Similarly, single-stranded RNA (ssRNA) in the endosome is sensed by TLR7 and TLR8 (only in humans), and its known synthetic ligands, resiquimod and imiquimod, are FDA-approved topical cancer immunotherapies.

[0524] In the cytosol, double-stranded RNA (dsRNA) is sensed by RNA helicases, such as retinoic acid-inducible gene I (RIG-I) and melanoma differentiation-associated gene 5 (MDA-5), leading to induction of type I IFN (see, e.g., Ireton and Gale (2011) Viruses 3(6):906-919). The cytosolic sensor for dsDNA is mediated through Stimulator of Interferon Genes (STING), an ER-resident adaptor protein that is the central mediator for sensing cytosolic dsDNA from infectious pathogens or aberrant host cell damage (see, e.g., Barber (2011) Immunol. Rev. 243(1):99-108). STING signaling activates the TANK-binding kinase 1 (TBK1)/interferon regulatory factor 3 (IRF3) axis, and the NF-κB signaling axis, resulting in the induction of IFN-β and other pro-inflammatory cytokines and chemokines that strongly activate innate and adaptive immunity (see, e.g., Burdette et al. (2011) Nature 478(7370):515-518). Sensing of cytosolic dsDNA through STING requires cyclic GMP-AMP synthase (cGAS), a host cell nucleotidyl transferase that directly binds dsDNA, and in response, synthesizes a cyclic dinucleotide (CDN) second messenger, cyclic GMP-AMP (cGAMP), which binds and activates STING (see, e.g., Sun et al. (2013) Science 339(6121):786-791; and Wu et al. (2013) Science 339(6121):826-830).

[0525] STING also can bind to bacterially-derived CDNs, such as c-di-AMP produced from intracellular L. monocytogenes, or c-di-GMP from S. typhimurium. It was later discovered that cGAS produces a non-canonical CDN that can activate human STING alleles that are non-responsive to bacterially-derived canonical CDNs. Unlike the CDNs produced by bacteria, in which the two purine nucleosides are joined by a phosphate bridge with 3′-3′ linkages, the internucleotide phosphate bridge in the cGAMP synthesized by cGAS is joined by a non-canonical 2′-3′ linkage. These 2′-3′ molecules bind STING with 300-fold better affinity than bacterial 3′-3′ c-di-GMP, and thus, are more potent physiological ligands of STING (see, e.g., Civril et al. (2013) Nature 498(7454):332-337; Diner et al. (2013) Cell Rep. 3(5):1355-1361; Gao et al. (2013) Sci. Signal 6(269):p11; and Ablasser et al. (2013) Nature 503(7477):530-534). The cGAS/STING signaling pathway in humans appears to have evolved to preferentially respond to viral pathogens over bacterial pathogens.

[0526] Thus, viral-sensing PRRs and TLRs, such as STING, RIG-I, TLR3 and TLR7/8, induce type I IFN, and the cytokines and chemokines that lead to effective T-cell mediated adaptive immunity. In the tumor setting, type I IFN signaling is required to induce T-cell trafficking chemokines, such as CXCL10, and also to activate DC cross-presentation of tumor antigens to prime CD8⁺ T-cells (see, e.g., Diamond et al. (2011) J. Exp. Med. 208(10):1989-2003; and Fuertes et al. (2011) J. Exp. Med. 208(10):2005-2016).

[0527] In contrast, host surveillance of bacteria, such as S. typhimurium, is largely mediated through TLR2, TLR4, and TLR5 (see, e.g., Arpaia et al. (2011) Cell 144(5):675-688). These TLRs signal through MyD88 (myeloid differentiation primary response protein 88) and TRIF (Toll/interleukin-1 receptor (TIR)-domain-containing adapter-inducing interferon-β) adaptor molecules to mediate induction of the NF-κB-dependent pro-inflammatory cytokines TNF-α and IL-6 (see, e.g., Pandey et al. (2015) Cold Spring Harb. Perspect. Biol. 7(1):a016246). S. typhimurium was shown to activate the NLRP3 inflammasome pathway, resulting in the cleavage of caspase-1 and the induction of the pro-inflammatory cytokines IL-1β and IL-18 that lead to pyroptotic cell death. Engagement of TLR2, TLR4 and TLR5, and inflammasome activation, induces chemokines and cytokines that lead to bacterial clearance by neutrophils and macrophages. Evidence that S. typhimurium is cleared by T-cells is limited, and antibodies that are generated against it are non-neutralizing (see, e.g., McSorley (2014) Immunol. Rev. 260(1):168-182). Further, S. typhimurium has mechanisms to directly suppress T-cell function, impairing any potential anti-tumor T-cell response from being generated (see, e.g., Kullas et al. (2012) Cell Host Microbe. 12(6)791-798). As a result, bacterial cancer therapies, such as S. typhimurium, lead to recruitment and clearance by neutrophils and macrophages, which are not the T-cells that are required to generate adaptive anti-tumor immunity. It is described herein that these differences can explain why prior bacterial anti-cancer vaccines, even those harboring host tumor antigens, are poor T-cell priming vectors in humans.

[0528] These problems are among those addressed by the immunostimulatory bacteria provided herein. The immunostimulatory bacteria provided herein are engineered to have advantageous properties that were previously only provided by viral therapeutics, and also, to retain the advantageous properties of bacterial therapeutics. The bacteria provided herein can be systemically administered, can localize to tumors, tumor-resident immune cells, and/or the tumor microenvironment, overcome immunosuppression, and properly activate anti-tumor immunity, while also limiting the autoimmune-related toxicities of existing systemic immunotherapies. The immunostimulatory bacteria provided herein effectively localize to tumor-resident immune cells, and encode therapeutic anti-cancer products, and can encode a plurality of such products. For example, the bacteria provided herein can encode complementary therapeutic products.

[0529] Provided herein is a superior microbial anti-cancer platform, engineered to retain the beneficial properties of bacteria, while eliciting a viral-like immune response that induces effective adaptive immunity. As described herein, bacteria, such as strains of Salmonella and other species, can be modified as described herein to have reduced inflammatory effects, and thus, to be less toxic. As a result, for example, higher dosages can be administered. Any of these strains of Salmonella, as well as other species of bacteria, known to those of skill in the art and/or listed above and herein, can be modified as described herein. The immunostimulatory bacteria provided herein are modified to have increased colonization of the tumor microenvironment, tumor-resident immune cells, and tumors. They are engineered so that they have reduced toxicity, and other properties that target them to the tumor microenvironment, including adenosine auxotrophy. The strains provided herein also are engineered so that they are not inactivated by complement.

[0530] Provided is an anti-cancer therapeutic product that delivers a genetic payload encoding a truncated co-stimulatory molecule (receptor or ligand; e.g., 4-1BBL, CD80, CD86, CD27L, B7RP1, OX40L), with a full or truncated or partial cytoplasmic domain deletion, for expression on an antigen-presenting cell (APC), where the truncated gene product is capable of constitutive immuno-stimulatory signaling to a T-cell through co-stimulatory receptor engagement, and is unable to counter-regulatory signal to the APC due to a deleted or truncated cytoplasmic domain. The co-stimulatory molecules also can be modified to include residues (such as positive residues) in the truncated cytoplasmic domain, to ensure that they are expressed in the correct orientation in the cell membrane (the Examples below describe this in more detail; see, e.g., Example 19).

[0531] The bacterial strains provided herein are engineered to deliver therapeutic products. The bacterial strains herein deliver immunostimulatory proteins, including cytokines, chemokines and co-stimulatory molecules, as well as modified gain-of-function cytosolic DNA/RNA sensors that can constitutively evoke or induce type I IFN expression, and other therapeutic products, such as, but not limited to, antibodies and fragments thereof, TGF-β and IL-6 binding decoy receptors, TGF-β polypeptide antagonists, bispecific T-cell engagers (BiTEs®), RNAi, and complementary combinations thereof, that promote an anti-tumor immune response in the tumor microenvironment. The bacterial strains also include genomic modifications that reduce pyroptosis of phagocytic cells, thereby providing for a more robust immune response, and/or reduce or eliminate the ability to infect/invade epithelial cells, but retain the ability to infect/invade phagocytic cells, so that they accumulate more effectively in tumors, the tumor microenvironment and in tumor-resident immune cells. The bacterial strains also can be modified to be resistant to inactivation by complement factors in human serum. The bacterial strains also can be modified to encode therapeutic products, including, alone or in combinations, for example, cytokines, chemokines, co-stimulatory molecules, constitutively active inducers of type I IFN, and monoclonal antibodies (and fragments thereof) to immune checkpoints, and also to other such targets.

### C. Modifications and Enhancements of Immunostimulatory Bacteria to Increase Therapeutic Index and to Increase Accumulation in Tumor-Resident Myeloid Cells

[0532] Provided herein are enhancements, including modifications to the bacterial genome, or to the immunostimulatory bacteria, that, for example, reduce toxicity and improve the anti-tumor activity, such as by increasing accumulation in tumor-resident myeloid cells, improving resistance to complement inactivation, reducing immune cell death, promoting adaptive immunity, and enhancing T-cell function. The modifications are described with respect to Salmonella, particularly S. typhimurium; it is understood that the skilled person can effect similar enhancements/modifications in other bacterial species and in other Salmonella strains. Exemplary of such enhancements/modifications are the following.

[0533] 1. Deletions in Genes in the LPS Biosynthetic Pathway

[0534] The lipopolysaccharide (LPS) of Gram-negative bacteria is the major component of the outer leaflet of the bacterial membrane. It is composed of three major parts, lipid A, a non-repeating core oligosaccharide, and the 0 antigen (or O polysaccharide). 0 antigen is the outermost portion on LPS and serves as a protective layer against bacterial permeability, however, the sugar composition of 0 antigen varies widely between strains. The lipid A and core oligosaccharide vary less, and are more typically conserved within strains of the same species. Lipid A is the portion of LPS that contains endotoxin activity. It is typically a disaccharide decorated with multiple fatty acids. These hydrophobic fatty acid chains anchor the LPS into the bacterial membrane, and the rest of the LPS projects from the cell surface. The lipid A domain is responsible for much of the toxicity of Gram-negative bacteria. Typically, LPS in the blood is recognized as a significant pathogen associated molecular pattern (PAMP), and induces a profound pro-inflammatory response. LPS is the ligand for a membrane-bound receptor complex comprising CD14, MD2, and TLR4. TLR4 is a transmembrane protein that can signal through the MyD88 and TRIF pathways to stimulate the NF-κB pathway and result in the production of pro-inflammatory cytokines, such as TNF-α and IL-6, the result of which can be endotoxic shock, which can be fatal. LPS in the cytosol of mammalian cells can bind directly to the caspase recruitment domains (CARDs) of caspases 4, 5, and 11, leading to autoactivation and pyroptotic cell death (see, e.g., Hagar et al. (2015) Cell Research 25:149-150). The composition of lipid A and the toxigenicity of lipid A variants is well documented. For example, a monophosphorylated lipid A is much less inflammatory than lipid A with multiple phosphate groups. The number and length of the acyl chains on lipid A also can have a profound impact on the degree of toxicity. Canonical lipid A from E. coli has six acyl chains, and this hexa-acylation is potently toxic. S. typhimurium lipid A is similar to that of E. coli; it is a glucosamine disaccharide that carries four primary and two secondary hydroxyacyl chains (see, e.g., Raetz et al. (2002) Annu. Rev. Biochem. 71:635-700).

[0535] a. msbB Deletion

[0536] The enzyme lipid A biosynthesis myristoyltransferase, encoded by the msbB gene in S. typhimurium, catalyzes the addition of a terminal myristoyl group to the lipid A domain of lipopolysaccharide (LPS) (see, e.g., Low et al. (1999) Nat. Biotechnol. 17(1):37-41). Deletion of msbB, thus, alters the acyl composition of the lipid A domain of LPS, the major component of the outer membranes of Gram-negative bacteria. For example, deletion of msbB in the S. typhimurium strain VNP20009 results in the production of a predominantly penta-acylated lipid A, which is less toxic than native hexa-acylated lipid A, and allows for systemic delivery without the induction of toxic shock (see, e.g., Lee et al. (2000) International Journal of Toxicology 19:19-25). This modification significantly reduces the ability of the LPS to induce septic shock, attenuating the bacterial strain, and thus, increasing the therapeutic index of Salmonella-based immunotherapeutics (see, e.g., U.S. Patent Publication Nos. 2003/0170276, 2003/0109026, 2004/0229338, 2005/0255088, and 2007/0298012). Importantly, msbB mutants that do not express the msbB product are unable to replicate intracellularly, as exemplified herein (see, e.g., Example 2), which is a requirement for Salmonella virulence (see, e.g., Leung et al. (1991) Proc. Natl. Acad. Sci. U.S.A. 88:11470-11474).

[0537] Other LPS mutations, including replacements, deletions, or insertions, that alter LPS expression, can be introduced into the bacterial strains provided herein, including the Salmonella strains, that dramatically reduce virulence, and thereby provide for lower toxicity, and permit the administration of higher doses.

[0538] Corresponding genes, encoding homologs or orthologs of lipid A biosynthesis myristoyltransferase in other bacterial species, also can be deleted or disrupted to achieve similar results. These genes include, but are not limited to, for example, lpxM, encoding myristoyl-acyl carrier protein-dependent acyltransferase in E. coli; and msbB, encoding lipid A acyltransferase in S. typhi.

[0539] b. pagP Deletion

[0540] As described above, msbB mutants of S. typhimurium cannot undergo the terminal myristoylation of lipid A, and produce predominantly penta-acylated lipid A that is significantly less toxic than hexa-acylated lipid A. The modification of lipid A with palmitate is catalyzed by the enzyme lipid A palmitoyltransferase (PagP). Transcription of the pagP gene is under control of the PhoP/PhoQ system which is activated by low concentrations of magnesium, e.g., inside the SCV. Thus, the acyl content of S. typhimurium lipid A is variable, and with wild-type bacteria, it can be hexa-acylated or penta-acylated. The ability of S. typhimurium to palmitate its lipid A increases resistance to antimicrobial peptides that are secreted into phagolysosomes.

[0541] In wild-type S. typhimurium, expression of pagP results in lipid A that is hepta-acylated. In an msbB mutant (in which the terminal acyl chain of the lipid A cannot be added), the induction of pagP results in a hexa-acylated lipid A (see, e.g., Kong et al. (2011) Infection and Immunity 79(12):5027-5038). Hexa-acylated lipid A has been shown to be the most pro-inflammatory. While groups have sought to exploit this pro-inflammatory signal, for example, by deletion or disruption of pagP to allow only hexa-acylated lipid A to be produced (see, e.g., Felgner et al. (2016) Gut Microbes 7(2):171-177; and Felgner et al. (2018) Oncoimmunology 7(2):e1382791), this can lead to poor tolerability, due to the TNF-α-mediated pro-inflammatory nature of the LPS, and paradoxically less adaptive immunity (see, e.g., Kocijancic et al. (2017) Oncotarget 8(30):49988-50001).

[0542] LPS is a potent TLR4 agonist that induces TNF-α and IL-6. The dose-limiting toxicities in the I.V. VNP20009 clinical trial (see, e.g., Toso et al. (2002) J. Clin. Oncol. 20(1):142-152), at 1E9 CFUs/m², were cytokine mediated (fever, hypotension), with TNF-α levels >100,000 pg/ml, and IL-6 levels >10,000 pg/ml in serum at 2 hours. Despite the msbB deletion in VNP20009 and its reduced pyrogenicity, the LPS still can be toxic at high doses, possibly due to the presence of hexa-acylated lipid A. Thus, a pagP⁻/msbB⁻ strain, which cannot produce hexa-acylated lipid A, and produces only penta-acylated lipid A, resulting in lower induction of pro-inflammatory cytokines, is better tolerated at higher doses, and will allow for dosing in humans at or above 1E9 CFUs/m². Higher dosing leads to increased colonization of tumors, tumor-resident immune cells, and the tumor microenvironment, enhancing the therapeutic efficacy of the immunostimulatory bacteria. Because of the resulting change in bacterial membranes and structure, the host immune response, such as complement activity, is altered so that the bacteria are not eliminated upon systemic administration. For example, it is shown herein (see, e.g., Example 5) that pagP⁻/msbB⁻ mutant strains have increased resistance to complement inactivation, and enhanced stability in human serum.

[0543] Provided herein are immunostimulatory bacteria, exemplified by live attenuated Salmonella strains, such as the exemplary strain of S. typhimurium, that only can produce LPS with penta-acylated lipid A, that contain a deletion or disruption of the msbB gene, and that further are modified by deletion or disruption of pagP. As discussed above, deletion of msbB expression prevents the terminal myristoylation of lipid A, while deletion of pagP expression prevents palmitoylation. A strain modified to produce LPS with penta-acylated lipid A results in lower levels of pro-inflammatory cytokines, improved stability in the blood, resistance to complement fixation, increased sensitivity to antimicrobial peptides, enhanced tolerability, and increased anti-tumor immunity when further modified to express heterologous genetic payloads that stimulate the immune response in the tumor microenvironment.

[0544] Corresponding genes, encoding homologs and orthologs of lipid A palmitoyltransferase (PagP) in other bacterial species, also can be deleted or disrupted to achieve similar results. These genes include, but are not limited to, for example, pagP, encoding Lipid IVA palmitoyltransferase in E. coli; and pagP, encoding antimicrobial peptide resistance and lipid A acylation protein in S. typhi.

[0545] 2. Nutrient Auxotrophy

[0546] The immunostimulatory bacteria provided herein can be attenuated by rendering them auxotrophic for one or more essential nutrients, such as purines (for example, adenine), nucleosides (for example, adenosine), amino acids (for example, aromatic amino acids, arginine, and leucine), adenosine triphosphate (ATP), or other nutrients as known and described in the art.

[0547] a. purI Deletion/Disruption

[0548] Phosphoribosylaminoimidazole synthetase, an enzyme encoded by the purI gene (synonymous with the purM gene), is involved in the biosynthesis pathway of purines. Disruption or deletion or inactivation of the purI gene, thus, renders the bacteria auxotrophic for purines. In addition to being attenuated, purI⁻ mutants are enriched in the tumor environment and have significant anti-tumor activity (see, e.g., Pawelek et al. (1997) Cancer Research 57:4537-4544). It was previously described that this colonization results from the high concentration of purines present in the interstitial fluid of tumors as a result of their rapid cellular turnover. Since the purI⁻ bacteria are unable to synthesize purines, they require an external source of adenine, and it was thought that this would lead to their restricted growth in the purine-enriched tumor microenvironment (see, e.g., Rosenberg et al. (2002) J. Immunotherapy 25(3):218-225). While the VNP20009 strain was initially reported to contain a deletion of the purI gene (see, e.g., Low et al. (2003) Methods in Molecular Medicine Vol. 90, Suicide Gene Therapy: Methods and Reviews, pp. 47-59), subsequent analysis of the entire genome of VNP20009 demonstrated that the purI gene is not deleted, but is disrupted by a chromosomal inversion (see, e.g., Broadway et al. (2014) Journal of Biotechnology 192:177-178). The entire purI gene is contained within two parts of the VNP20009 chromosome that is flanked by insertion sequences, one of which has an active transposase. While disruption of the purI gene limits replication to the tumor tissue/microenvironment, it still permits intracellular replication and virulence. Deletion or disruption of each of the msbB and the purI genes, as exemplified herein (see, Example 2), is required to limit bacterial growth to the extracellular space in tumor tissue, and prevent intracellular replication. Provided herein are strains in which the coding portion of these genes are completely deleted to eliminate any possible reversion to wild-type by recombination.

[0549] Besides purI gene deletions or disruptions, nutrient auxotrophy can be introduced into the immunostimulatory bacteria by deletions/mutations in genes such as aro, gua, thy, nad, and asd, for example. Nutrients produced by the biosynthesis pathways involving these genes are often unavailable in host cells, and as such, bacterial survival is challenging. For example, attenuation of Salmonella and other bacterial species can be achieved by deletion of the aroA gene, which is part of the shikimate pathway, connecting glycolysis to aromatic amino acid biosynthesis (see, e.g., Felgner et al. (2016) mBio 7(5):e01220-16). Deletion of aroA results in bacterial auxotrophy for aromatic amino acids and subsequent attenuation (see, e.g., U.S. Patent Publication Nos. 2003/0170276, 2003/0175297, 2012/0009153, and 2016/0369282; and International Application Publication Nos. WO 2015/032165 and WO 2016/025582). Similarly, other enzymes involved in the biosynthesis pathway for aromatic amino acids, including aroC and aroD, have been deleted to achieve attenuation (see, e.g., U.S. Patent Publication No. 2016/0369282; and International Application Publication No. WO 2016/025582). For example, S. typhimurium strain SL7207 is an aromatic amino acid auxotroph (aroA⁻ mutant); strains A1 and A1-R are leucine-arginine auxotrophs; and VNP20009/YS1646 is a purine auxotroph (purI⁻ mutant). As shown herein, VNP20009/YS1646 is also auxotrophic for the immunosuppressive nucleoside adenosine, and for ATP (see, e.g., Example 1).

[0550] Corresponding genes, encoding homologs or orthologs of phosphoribosyl-aminoimidazole synthetase (Purl), and other genes required for purine synthesis in other bacterial species, also can be deleted or disrupted to achieve similar results. These genes include, but are not limited to, for example, purM, encoding phosphori-bosylformylglycinamide cyclo-ligase in E. coli; purM, encoding phosphoribosyl-formylglycinamidine cyclo-ligase in S. typhi; purA, encoding adenylosuccinate synthetase, purA, encoding phosphoribosylformylglycinamidine synthase II, and purS, encoding phosphoribosylformylglycinamidine synthase subunit PurS in L. monocytogenes; purM (BL1122), encoding phosphoribosylformylglycinamidine cyclo-ligase in Bifidobacterium longum; and NT01CX_RS09765, encoding AIR synthase, and NT01CX_RS07625 (purM), encoding phosphoribosylformylglycinamidine cyclo-ligase in Clostridium novyi.

[0551] b. Adenosine Auxotrophy

[0552] Metabolites derived from the tryptophan and adenosine triphosphate (ATP)/adenosine pathways are major drivers in forming an immunosuppressive environment within the tumor/tumor microenvironment (TME). Adenosine, which exists in the free form inside and outside of cells, is an effector of immune function. Adenosine decreases T-cell receptor induced activation of NF-κB, and inhibits IL-2, IL-4, and IFN-γ. Adenosine decreases T-cell cytotoxicity, increases T-cell anergy, and increases T-cell differentiation to Foxp3⁺ or Lag3⁺ regulatory T-cells (T-reg cells, T-regs, or Tregs). On natural killer (NK) cells, adenosine decreases IFN-γ production, and suppresses NK cell cytotoxicity. Adenosine blocks neutrophil adhesion and extravasation, decreases phagocytosis, and attenuates levels of superoxide and nitric oxide. Adenosine also decreases the expression of TNF-α, IL-12, and MIP-1α (CCL3) on macrophages, attenuates major histocompatibility complex (WIC) Class II expression, and increases levels of IL-1β and IL-6. Adenosine immunomodulation activity occurs after its release into the extracellular space of the tumor and activation of adenosine receptors (ADRs) on the surface of target immune cells, cancer cells, or endothelial cells. The high adenosine levels in the tumor microenvironment result in local immunosuppression, which limits the capacity of the immune system to eliminate cancer cells.

[0553] Extracellular adenosine is produced by the sequential activities of membrane associated ectoenzymes CD39 (ecto-nucleoside triphosphate diphosphohydrolase1, or NTPDase1) and CD73 (ecto-5′-nucleotidase), which are expressed on tumor stromal cells, together producing adenosine by phosphohydrolysis of ATP or ADP produced from dead or dying cells. CD39 converts extracellular ATP (or ADP) to 5′-AMP, which is converted to adenosine by CD73. Expression of CD39 and CD73 on endothelial cells is increased under the hypoxic conditions of the tumor microenvironment, thereby increasing levels of adenosine. Tumor hypoxia can result from inadequate blood supply and disorganized tumor vasculature, impairing delivery of oxygen (see, e.g., Carroll and Ashcroft (2005) Expert. Rev. Mol. Med. 7(6), DOI: 10.1017/S1462399405009117). Hypoxia, which occurs in the tumor micro-environment, also inhibits adenylate kinase (AK), which converts adenosine to AMP, leading to very high extracellular adenosine concentrations. The extracellular concentration of adenosine in the hypoxic tumor microenvironment has been measured at 10-100 which is up to about 100-1000 fold higher than the typical extracellular adenosine concentration of approximately 0.1 μM (see, e.g., Vaupel et al. (2016) Adv. Exp. Med. Biol. 876:177-183; and Antonioli et al. (2013) Nat. Rev. Can. 13:842-857). Since hypoxic regions in tumors are distal from microvessels, the local concentration of adenosine in some regions of the tumor can be higher than in others.

[0554] To direct effects to inhibit the immune system, adenosine also can control cancer cell growth and dissemination by effects on cancer cell proliferation, apoptosis, and angiogenesis. For example, adenosine can promote angiogenesis, primarily through the stimulation of A_{2A} and A_{2B} receptors. Stimulation of the receptors on endothelial cells can regulate the expression of intercellular adhesion molecule 1 (ICAM-1) and E-selectin on endothelial cells, maintain vascular integrity, and promote vessel growth (see, e.g., Antonioli et al. (2013) Nat. Rev. Can. 13:842-857). Activation of one or more of A2A, A2B, or A3 on various cells by adenosine can stimulate the production of the pro-angiogenic factors, such as vascular endothelial growth factor (VEGF), interleukin-8 (IL-8) or angiopoietin 2 (see, e.g., Antonioli et al. (2013) Nat. Rev. Can. 13:842-857).

[0555] Adenosine also can directly regulate tumor cell proliferation, apoptosis, and metastasis through interaction with receptors on cancer cells. For example, studies have shown that the activation of A₁ and A_{2A} receptors promote tumor cell proliferation in some breast cancer cell lines, and activation of A_{2B} receptors have cancer growth-promoting properties in colon carcinoma cells (see, e.g., Antonioli et al. (2013) Nat. Rev. Can. 13:842-857). Adenosine also can trigger apoptosis of cancer cells, and various studies have correlated this activity to activation of the extrinsic apoptotic pathway through A₃, or the intrinsic apoptotic pathway through A_{2A} and A_{2B} (see, e.g., Antonioli et al. (2013)). Adenosine can promote tumor cell migration and metastasis, by increasing cell motility, adhesion to the extracellular matrix, and expression of cell attachment proteins and receptors to promote cell movement and motility.

[0556] The extracellular release of adenosine triphosphate (ATP) occurs from stimulated immune cells, and from damaged, dying, or stressed cells. The NLR family pyrin domain-containing 3 (NLRP3) inflammasome, when stimulated by this extracellular release of ATP, activates caspase-1 and results in the secretion of the cytokines IL-1β and IL-18, which in turn activate innate and adaptive immune responses (see, e.g., Stagg and Smyth (2010) Oncogene 29:5346-5358). ATP can accumulate to concentrations exceeding 100 mM in tumor tissue, whereas levels of ATP found in healthy tissues are very low (˜1-5 μM) (see, e.g., Song et al. (2016) Am. J. Physiol. Cell Physiol. 310(2):C99-C114). ATP is catabolized into adenosine by the enzymes CD39 and CD73. Activated adenosine acts as a highly immunosuppressive metabolite via a negative-feedback mechanism and has a pleiotropic effect against multiple immune cell types in the hypoxic tumor microenvironment (see, e.g., Stagg and Smyth (2010) Oncogene 29:5346-5358). Adenosine receptors A2A and A2B are expressed on a variety of immune cells and are stimulated by adenosine to promote cAMP-mediated signaling changes, resulting in immunosuppressive phenotypes of T-cells, B-cells, NK cells, dendritic cells (DCs), mast cells, macrophages, neutrophils, and natural killer T (NKT) cells. As a result, adenosine levels can accumulate to over one hundred times their normal concentration in pathological tissues, such as solid tumors, which have been shown to overexpress ecto-nucleotidases, such as CD73. Adenosine also has been shown to promote tumor angiogenesis and development. An engineered bacterium that is auxotrophic for adenosine would thus exhibit enhanced tumor-targeting and colonization.

[0557] Immunostimulatory bacteria, such as Salmonella typhi, can be made auxotrophic for adenosine by, for example, deletion of the tsx gene (see, e.g., Bucarey et al. (2005) Infection and Immunity 73(10):6210-6219) or by deletion of purD (see. e.g., Husseiny (2005) Infection and Immunity 73(3):1598-1605). In the Gram-negative bacteria Xanthomonas oryzae, a purD gene knockout was shown to be auxotrophic for adenosine (see, e.g., Park et al. (2007) FEMS Microbiol. Lett. 276:55-59). As exemplified herein, S. typhimurium strain VNP20009 is auxotrophic for adenosine due to its purI modification; hence, further modification to render it auxotrophic for adenosine is not required. Hence, embodiments of the immunostimulatory bacterial strains, as provided herein, are auxotrophic for adenosine. Such auxotrophic bacteria selectively replicate in the tumor microenvironment, further increasing accumulation and replication of the administered bacteria in tumors, and decreasing the levels of adenosine in and around tumors, thereby reducing or eliminating the immunosuppression caused by the accumulation of adenosine. Exemplary of such bacteria, provided herein, is a modified strain of S. typhimurium containing purr msbB⁻ mutations to provide adenosine auxotrophy. For other strains and bacteria, the purI gene can be disrupted as it has been in VNP20009, or it can contain a deletion of all or a portion of the purI gene, which ensures that there cannot be a reversion to a wild-type gene. As described elsewhere herein, in strain VNP20009, the purI gene was inactivated by inversion. Similarly, the msbB gene in VNP20009 was not completely deleted. As exemplified herein, strains in which the purI and msbB genes have been completely deleted to eliminate any risk of reversion, demonstrate superior fitness as assessed by growth of cultures in vitro.

[0558] Immunostimulatory bacteria modified by rendering them auxotrophic for one or more essential nutrients, such as purines (for example, adenine), nucleosides (for example, adenosine), amino acids (for example, aromatic amino acids, arginine, and leucine), or adenosine triphosphate (ATP), are employed. In particular, in embodiments of the immunostimulatory bacteria provided herein, such as strains of S. typhimurium, the bacteria are rendered auxotrophic for adenosine, and optionally, for ATP, and preferentially accumulate in tumor microenvironments (TMEs). Hence, strains of immunostimulatory bacteria described herein are attenuated because they require purines, adenosine, and/or ATP for growth, and they preferentially colonize TMEs, which, as discussed below, have an abundance of these metabolites. Because adenosine accumulation in the tumor microenvironment of some tumors is immunosuppressive, adenosine auxotrophy eliminates the immunosuppression from adenosine that accumulates in the tumor microenvironment of certain cancers.

[0559] 3. Plasmid Maintenance and Delivery

[0560] a. asd Deletion

[0561] The asd gene in bacteria encodes an aspartate-semialdehyde dehydrogenase. asd⁻ mutants of S. typhimurium have an obligate requirement for diaminopimelic acid (DAP), which is required for cell wall synthesis, and will undergo lysis in environments deprived of DAP. This DAP auxotrophy can be used for plasmid selection and maintenance of plasmid stability in vivo, without the use of antibiotics, when the asd gene is complemented in trans on a plasmid in the bacterium. Non-antibiotic-based plasmid selection systems are advantageous, and allow for 1) the use of administered antibiotics as a rapid clearance mechanism in the event of adverse symptoms, and 2) for antibiotic-free scale up of production, where such use is commonly avoided. The asd gene complementation system provides for such non-antibiotic-based plasmid selection (see, e.g., Galan et al. (1990) Gene 94(1):29-35). The use of the asd gene complementation system to maintain plasmids in the tumor microenvironment is expected to increase the potency of S. typhimurium strains engineered to deliver plasmids encoding genetic payloads/therapeutic products, such as immunostimulatory proteins (e.g., cytokines, chemokines, co-stimulatory molecules); cytosolic DNA/RNA sensors that induce type I IFN, such as STING and IRF3, and gain-of-function/constitutively active mutants thereof; antibodies and fragments thereof (e.g., checkpoint inhibitors, or anti-IL-6 or anti-VEGF antibodies); bi-specific T-cell engagers (sold under the trademark BiTEs®); interfering RNAs; and other therapeutic products as discussed elsewhere herein and known in the art; and complementary combinations of all of the preceding therapeutic products.

[0562] An alternative use for an asd mutant of S. typhimurium is to exploit the DAP auxotrophy to produce an autolytic (or suicidal) strain, for delivery of therapeutic products/macromolecules to infected cells, without the ability to persistently colonize host tumors. Deletion of the asd gene makes the bacteria auxotrophic for DAP when grown in vitro or in vivo. An example described herein, provides an asd deletion strain that is auxotrophic for DAP, and that contains a plasmid suitable for delivery of immunomodulatory proteins, but that does not contain an asd complementing gene, resulting in a strain that is defective for replication in vivo. This strain is propagated in vitro in the presence of DAP, and grows normally, and then is administered as an immunotherapeutic agent to a mammalian host where DAP is not present. The suicidal strain is able to invade host cells, but is not be able to replicate due to the absence of DAP in mammalian tissues, lysing automatically, and delivering its cytosolic contents (e.g., plasmids or proteins).

[0563] Corresponding genes, encoding homologs or orthologs of aspartate-semialdehyde dehydrogenase (asd) in other bacterial species, also can be deleted or disrupted to achieve similar results. These genes include, but are not limited to, for example, asd, encoding aspartate-semialdehyde dehydrogenase in E. coli; asd (STY4271), encoding aspartate-semialdehyde dehydrogenase in S. typhi; asd (lmo1437), encoding aspartate-semialdehyde dehydrogenase in L. monocytogenes; asd (BL0492), encoding aspartate-semialdehyde dehydrogenase in Bifidobacterium longum; and NT01CX_RS04325 (asd), encoding aspartate-semialdehyde dehydrogenase in Clostridium novyi.

[0564] b. endA Deletion/Disruption

[0565] The endA gene (see, for example, SEQ ID NO:250) encodes an endonuclease (DNA-specific endonuclease I; see, for example, SEQ ID NO:251) that mediates degradation of double-stranded DNA (dsDNA) in the periplasm of Gram-negative bacteria. Most common strains of laboratory E. coli are endA⁻, as a mutation in the endA gene allows for higher yields of plasmid DNA. This gene is conserved among species. To facilitate intact plasmid DNA delivery, the endA gene of the engineered immunostimulatory bacteria is deleted or mutated to prevent its endonuclease activity. Exemplary of such mutations is an E208K amino acid substitution (see, e.g., Durfee et al. (2008) J. Bacteriol. 190(7):2597-2606), or a corresponding mutation in the species of interest. endA, including residue E208, is conserved among bacterial species, including Salmonella. Thus, the E208K mutation can be used to eliminate endo-nuclease activity in other species, including Salmonella species. Those of skill in the art can introduce other mutations or deletions to eliminate endA activity. Effecting this mutation, or deleting or disrupting the gene to eliminate activity of endA in the immunostimulatory bacteria herein, such as in Salmonella, increases efficiency of intact plasmid DNA delivery, thereby increasing expression of any one, or two, or more, immunomodulatory proteins/therapeutic products encoded on the plasmid, and enhancing the anti-tumor immune response and anti-tumor efficacy.

[0566] 4. Flagellin Knockout Strains

[0567] Flagella are organelles on the surface of bacteria that are composed of a long filament that is attached, via a hook, to a rotary motor that can rotate in a clockwise or counterclockwise manner to provide a means for locomotion. Flagella, for example, in S. typhimurium, are important for chemotaxis and for establishing an infection via the oral route, due to the ability to mediate motility across the mucous layer in the gastrointestinal tract. While flagella have been demonstrated to be required for chemotaxis to and colonization of tumor cylindroids in vitro (see, e.g., Kasinskas and Forbes (2007) Cancer Res. 67(7):3201-3209), and motility has been shown to be important for tumor penetration (see, e.g., Toley and Forbes (2012) Integr. Biol. (Camb) 4(2):165-176), flagella are not required for tumor colonization in animals when the bacteria are administered intravenously (see, e.g., Stritzker et al. (2010) International Journal of Medical Microbiology 300:449-456). Each flagellar filament is composed of tens of thousands of flagellin subunits. The S. typhimurium chromosome contains two genes, fliC and fljB, that encode antigenically distinct flagellin monomers. Mutants defective for both fliC and fljB are nonmotile and avirulent when administered via the oral route of infection, but maintain virulence when administered parenterally.

[0568] Flagellin is a major pro-inflammatory determinant of Salmonella (see, e.g., Zeng et al. (2003) J. Immunol. 171:3668-3674), and is directly recognized by TLR5 on the surface of cells, and by NLCR4 in the cytosol (see, e.g., Lightfield et al. (2008) Nat. Immunol. 9(10):1171-1178). Both pathways lead to pro-inflammatory responses resulting in the secretion of cytokines, including IL-1β, IL-18, TNF-α, and IL-6. Attempts have been made to make Salmonella-based cancer immunotherapy more potent by increasing the pro-inflammatory response to flagellin by engineering the bacteria to secrete Vibrio vulnificus flagellin B, which induces greater inflammation than flagellin encoded by fliC and fljB (see, e.g., Zheng et al. (2017) Sci. Transl. Med. 9(376):eaak9537).

[0569] Herein, Salmonella bacteria, such as S. typhimurium, are engineered to lack both flagellin subunits fliC and fljB, to reduce TLR5-mediated pro-inflammatory signaling. Other bacteria that contain flagella can be similarly engineered to eliminate flagella. For example, as shown herein, a Salmonella strain lacking msbB and/or pagP, which results in reduced TNF-alpha induction, is combined with fliC and fljB knockouts. This results in a Salmonella strain that has a combined reduction in TNF-alpha induction and a reduction in TLR5 recognition. These bacterial modifications, msbB⁻, pagP⁻, fliC⁻, and fljB⁻, can be combined with an immunostimulatory plasmid, optionally containing CpGs, encoding therapeutic products, such as immunomodulatory proteins, alone, or in combinations thereof. The resulting bacteria have reduced pro-inflammatory signaling, but robust anti-tumor activity. These genome modifications can be combined with others of the genome modifications described herein as well.

[0570] For example, as exemplified and provided herein, a fliC and fljB double mutant was constructed in the asd-deleted strain of S. typhimurium, VNP20009. VNP20009, which is attenuated for virulence by disruption of purI/purM, contains a modification of the msbB gene (a partial deletion) that results in the production of a lipid A subunit that is less toxigenic than wild-type lipid A. This results in reduced TNF-α production in a mouse model after intravenous administration, compared to strains with wild-type lipid A. The resulting strain is exemplary of strains that are attenuated for bacterial inflammation by modification of lipid A to reduce TLR2/4 signaling, and by deletion of expression of the flagellin subunits to reduce TLR5 recognition and inflammasome induction.

[0571] Pathogenesis in certain bacterial species, including Salmonella species, such as S. typhimurium, involves a cluster of genes referred to as Salmonella pathogenicity islands (SPIs). Salmonella invades non-phagocytic intestinal epithelial cells using a type 3 secretion system (T3SS) encoded by the Salmonella pathogenicity island 1 (SPI-1), which forms a needle-like structure that injects effector proteins directly into the cytosol of host cells. These effector proteins lead to rearrangement of the eukaryo-tic cell cytoskeleton to facilitate invasion of the intestinal epithelium, and also induces proinflammatory cytokines. The SPI designated SPI-1 mediates invasion of epithelial cells. SPI-1 genes include, but are not limited to: avrA, hilA, hilD, invA, invB, invC, invE, invF, invG, invH, invI, invJ, iacP, iagB, spaO, spaP, spaQ, spaR, spaS, orgA, orgB, orgC, prgH, prgI, prgJ, prgK, sicA, sicP, sipA, sipB, sipC, sipD, sirC, sopB, sopD, sopE, sopE2, sprB, and sptP. Deletion of one or more of these genes reduces or eliminates the ability of the bacterium to infect epithelial cells, but does not affect their ability to infect or invade phagocytic cells, including phagocytic immune cells. For example, it was demonstrated that deletion of both the fliC and fljB genes significantly reduced expression of SPI-1 genes, such as hilA, hilD, invA, invF, and sopB, thereby reducing the ability to invade non-phagocytic cells (see, e.g., Elhadad et al. (2015) Infect. Immun. 83(9):3355-3368).

[0572] In bacteria such as Salmonella, flagellin, in addition to the SPI-1 type 3 secretion system (T3SS), is necessary for triggering pyroptosis in macrophages, and can be detected by the macrophage NLRC4 inflammasome. Elimination of flagellin subunits decreases pyroptosis in macrophages. For example, S. typhimurium with deletions in fliC and fljB results in significantly reduced IL-1β secretion compared to the wild-type strain, whereas cellular uptake and intracellular replication of the bacterium remains unaffected. This demonstrates that flagellin plays a significant role in inflammasome activation. Additionally, S. typhimurium strains engineered to constitutively express fliC were found to induce macrophage pyroptosis (see, e.g., Li et al. (2016) Scientific Reports 6:37447; Fink and Cookson (2007) Cellular Microbiology 9(11):2562-2570; and Winter et al. (2015) Infect. Immun. 83(4):1546-1555).

[0573] The genome of the immunostimulatory bacteria herein can be modified to delete or mutate the flagellin genes fliC and fljB in S. typhimurium, leading to decreased cell death of tumor-resident immune cells, such as macrophages, and enhancing the anti-tumor immune response of the immunostimulatory bacteria. Deletion of the flagellin subunits, combined with modification of the LPS, allows for greater tolerability in the host, limits uptake into only phagocytic cells and decreases their pyroptotic cell death, and directs the immunostimulatory response towards delivery of therapeutic products, such as immunomodulatory proteins, to the TME, particularly tumor-resident myeloid cells. The resulting immunostimulatory bacteria elicit an anti-tumor response, and promote an adaptive immune response to the tumor.

[0574] Corresponding genes, encoding flagellin in other bacterial species, also can be deleted to achieve similar results. These genes include, but are not limited to, for example, fliC, encoding flagellar filament structural protein, and fliE, encoding flagellar basal-body protein FliE in E. coli; fliC, encoding flagellin, and flgB, encoding flagellar basal-body rod protein FlgB, in S. typhi; flaA encoding flagellin, fliE, encoding flagellar hook-basal body protein FliE, and flgB, encoding flagellar basal-body rod protein FlgB, in L. monocytogenes; and NT01CX_RS04995, NT01CX_RS04990, NT01CX_RS05070, and NT01CX_RS05075, encoding flagellin, NT01CX_RS05080 (flgB), encoding flagellar basal body rod protein FlgB, NT01CX_RS05085 (flgC), encoding flagellar basal body rod protein FlgC, and NT01CX_RS05215 (flgG), encoding flagellar basal body rod protein FlgG, in Clostridium novyi.

[0575] 5. Engineering Bacteria to Promote Adaptive Immunity and Enhance T-Cell Function

[0576] L-Asparaginase II (ansB) Deletion/Disruption

[0577] L-asparaginase II is an enzyme that catalyzes conversion of L-asparagine to ammonia and aspartic acid. Several bacterial strains, such as E. coli and S. typhimurium, utilize L-asparaginase to scavenge fructose-asparagine as a carbon and nitrogen source (see, e.g., Sabag-Daigle et al. (2018) Appl. Environ. Microbiol. 84(5):e01957-17). Malignant T-cells, such as in acute lymphoblastic leukemia (ALL), require asparagine as they lack the enzymes to synthesize it. Administration of L-asparaginases has been a frontline therapy for ALL since the early 1970's (see, e.g., Batool et al. (2016) Appl. Biochem. Biotechnol. 178(5):900-923). Production of L-asparaginase II by S. typhimurium is both necessary and sufficient for T-cell inhibition, as it directly induces T-cell receptor (TCR) downregulation, decreases T-cell cytokine production, and inhibits tumor cytolytic function (see, e.g., Kullas et al. (2012) Cell Host Microbe. 12(6)791-798; and van der Velden et al. (2005) Proc. Natl. Acad. Sci. U.S.A. 102(49):17769-17774). Under rapid clonal expansion conditions, such as those that occur during T-cell activation in the tumor microenvironment, asparagine is required, and its depletion by L-asparaginase II leads to T-cell suppression. L-asparaginase II, thus, has been used as an anti-cancer therapeutic for cancers in which T-cell suppression is a therapeutic modality.

[0578] In contrast to the prior uses of L-asparaginase as an anti-cancer therapeutic, it is shown herein that elimination of L-asparaginase activity in the immunostimulatory bacteria provided herein enhances the function of T-cells in the tumor micro-environment. Elimination of L-asparaginase activity can be effected by modifying the bacterial genome to eliminate expression of active enzyme. Modifications include insertions, deletions, inversions, and replacements of nucleic acids, so that the resulting encoded enzyme is not active, or not expressed, or is eliminated. It is shown herein that deletion of all or of a part of the gene that encodes L-asparaginase II, ansB, or disruption thereof, to eliminate expression of the encoded enzyme in the immunostimulatory bacteria, enhances the function of T-cells in a bacterially-colonized tumor microenvironment. Inhibition of L-asparaginase II activity is accomplished by deletion of all or of a part of, or interruption/disruption of, the gene ansB in the immunostimulatory bacteria, whereby L-asparaginase II is not produced. Thus, provided are immunostimulatory bacteria whose genomes are modified so that L-asparaginase II is not produced. Immunostimulatory bacteria provided herein are employed to colonize tumor-resident immune cells to enhance the anti-tumor immune response; included among the genome modifications are deletions, insertions, disruptions, and/or other modifications that eliminate the expression of L-asparaginase II.

[0579] As shown herein, the genome of the immunostimulatory bacteria herein can be modified to delete ansB, or to disrupt it or to otherwise modify it, to result in inactive encoded L-asparaginase II, or to eliminate the asparaginase, preventing T-cell suppression, and enhancing the anti-tumor T-cell function in vivo. It is shown herein that strains in which ansB is intact induce profound T-cell immunosuppression in T-cells infected with the strain. Strains in which ansB is deleted do not induce immunosuppression, thus, solving another problem in the art in using bacteria to deliver encoded therapeutic products to tumors. Thus, immunostimulatory bacteria that combine deletions or disruptions of the ansB gene, whereby functional encoded enzyme is not expressed, with other modifications described herein that result in increased accumulation in the tumor microenvironment and/or in tumor-resident immune cells, provide superior therapeutic immunostimulatory bacteria.

[0580] Corresponding genes, encoding homologs or orthologs of L-asparaginase II (ansB) in other bacterial species, also can be deleted or disrupted to achieve similar results. These genes include, but are not limited to, for example, ansB, encoding L-asparaginase 2 in E. coli; ansB (STY3259), encoding L-asparaginase in S. typhi; ansB (lmo1663), encoding asparagine synthetase in L. monocytogenes; and BL1142, encoding an L-asparaginase precursor in Bifidobacterium longum.

[0581] 6. Deletions/Disruptions in Salmonella Genes Required for Curli Fimbriae Expression

[0582] Bacteria and fungi are capable of forming multicellular structures called biofilms. Bacterial biofilms are encased within a mixture of secreted and cell wall-associated polysaccharides, glycoproteins, and glycolipids, as well as extracellular DNA, known collectively as extracellular polymeric substances. These extracellular polymeric substances protect the bacteria from multiple insults, such as cleaning agents, antibiotics, and antimicrobial peptides. Bacterial biofilms allow for colonization of surfaces, and are a cause of significant infection of prosthetics, such as injection ports and catheters. Biofilms also can form in tissues during the course of an infection, which leads to increases in the duration of bacterial persistence and shedding, and limits the effectiveness of antibiotic therapies. Chronic persistence of bacteria in biofilms is associated with increased tumorigenesis, for example in S. typhi infection of the gall bladder (see, e.g., Di Domenico et al. (2017) Int. J. Mol. Sci. 18:1887).

[0583] In Salmonella, such as S. typhimurium, biofilm formation is regulated by the csgD gene, which activates the csgBAC operon, and results in increased production of the curli fimbriae subunits CsgA and CsgB (see, e.g., Zakikhany et al. (2010) Molecular Microbiology 77(3):771-786). CsgA is recognized as a PAMP by TLR2 and induces production of IL-8 from human macrophages (see, e.g., Tukel et al. (2005) Molecular Microbiology 58(1):289-304). Also, csgD indirectly increases cellulose production by activating the adrA gene that encodes for di-guanylate cyclase. The small molecule cyclic di-guanosine monophosphate (c-di-GMP), generated by adrA, is a ubiquitous secondary messenger that occurs in almost all bacterial species. Increases in c-di-GMP enhance expression of the cellulose synthase gene bcsA, which in turn increases cellulose production via stimulation of the bcsABZC and bcsEFG operons, leading to cellulose biofilm formation. As a result, bacteria, such as S. typhimurium, can form biofilms in solid tumors as protection against phagocytosis by host immune cells. Bacterial mutants, such as Salmonella mutants, that cannot form biofilms, are taken up more rapidly by host phagocytic cells, and are more readily cleared from infected tumors (see, e.g., Crull et al. (2011) Cellular Microbiology 13(8):1223-1233). This increase in intracellular localization within phagocytic cells can reduce the persistence of extracellular bacteria, and, as shown herein, can enhance the effectiveness of plasmid delivery of therapeutic products, such as immunomodulatory proteins and other anti-cancer therapeutics, as described herein. Reduction in the capability of immunostimulatory bacteria, such as S. typhimurium, to form biofilms, can be achieved through deletion or disruption of genes involved in biofilm formation, such as, for example, csgD, csgA, csgB, adrA, bcsA, bcsB, bcsZ, bcsE, bcsF, bcsG, dsbA, or dsbB (see, e.g., Anwar et al. (2014) PLoS ONE 9(8):e106095).

[0584] It is shown herein that engineering the immunostimulatory bacteria to reduce biofilm formation increases clearance rates from tumors/tissues, increasing tolerability of the therapy, and prevents colonization of prosthetics in patients, thereby increasing the therapeutic benefit of these strains. It is known that adenosine mimetics inhibit S. typhimurium biofilm formation, indicating that the high adenosine concentration in the tumor microenvironment can contribute to tumor-associated biofilm formation (see, e.g., Koopman et al. (2015) Antimicrob. Agents Chemother. 59:76-84). It is shown herein that csgD-deleted immunostimulatory bacterial strains demonstrate improved anti-tumor efficacy because of greater bacterial uptake into tumor-resident myeloid cells.

[0585] Corresponding genes, encoding homologs and orthologs of csgD, and other genes that are required for curli fimbriae and biofilm formation in other bacterial species, also can be deleted or disrupted or otherwise modified to achieve similar results. These genes include, but are not limited to, for example, csgD, encoding DNA-binding transcriptional dual regulator CsgD in E. coli; csgD (STY1179), encoding regulatory protein CsgD in S. typhi; and lcp, encoding the Listeria cellulose binding protein that is involved in biofilm formation in L. monocytogenes.

[0586] Modification of the bacterial genome, such as by deletion or disruption of genes to render the bacteria csgD⁻, results in elimination of curli fimbriae and inflammatory cyclic dinucleotides (CDNs), and removes cellulose secretion. This eliminates inflammatory and immunosuppressive elements, prevents TLR4 recognition through altered lipid A acylation, and eliminates cellulose secretion, and, thus, possible biofilm formation, thereby increasing safety and efficacy.

[0587] As described herein, bacterial strains, such as S. typhimurium strains, that are engineered to be auxotrophic for adenosine; and are reduced in their ability to induce pro-inflammatory cytokines by modification of the LPS and/or deletion of flagellin; and/or that do not express L-asparaginase II to improve T-cell function; and/or that contain deletions or disruptions of genes required for biofilm formation; and/or that are further modified to maintain significant plasmid copy number per cell, at least low to medium copy number or higher, in the absence of antibiotic selection; and that deliver genetic expression cassettes encoding therapeutic products, promote robust anti-tumor immune responses. The plasmids include regulatory sequences to promote secretion of the encoded therapeutic products into the tumor microenvironment.

[0588] 7. Improving Resistance to Complement

[0589] The complement system is the first line of immune defense against invading pathogens that directly activate the lectin pathway or the alternative pathway (AP) cascades in the human host. The complement system involves more than 30 soluble and cell-membrane bound proteins that function in the innate immune response to recognize and kill pathogens, such as bacteria, virus-infected cells, and parasites, and also, that play a role in the antibody-mediated immune response. Activation of the complement cascade leads to opsonization of foreign microbes, release of chemotactic peptides, and finally, to disruption of bacterial cell membranes. Three homologous glycoproteins in the complement system, C3, C4, and C5, play a central role in complement function and interact with other complement components. C3b and C4b, generated from C3 and C4, respectively, are important components of convertases that promote activation of the complement cascade. The cleavage fragments of C5 are C5a, which induces migration of phagocytes into the infection site, and C5b, which initiates the formation of the membrane attack complex (MAC), and bacterial lysis (see, e.g., Ramu et al. (2007) FEBS Letters 581:1716-1720).

[0590] To survive, pathogens have developed strategies to prevent deleterious consequences of complement activation. For example, members of the Ail/Lom family of outer membrane proteins provide protection from complement-dependent killing for a number of pathogenic bacteria. Members of the Ail/Lom family, which include Ail (attachment invasion locus) of Yersinia species, e.g., Y. enterocolitica and Y. pseudotuberculosis, Rck (resistance to complement killing) and PagC of Salmonella species, and OmpX of Escherichia coli, are outer membrane proteins that share significant amino acid sequence similarity and identity, and have similar membrane topologies. While members of this family of proteins exhibit diverse functions, several of them, including Ail of Y. enterocolitica and Y. pseudotuberculosis, as well as Rck of S. enterica, function, at least in part, to protect bacteria from complement-mediated lysis (see, e.g., Bartra et al. (2008) Infection and Immunity 76:612-622).

[0591] Another bacterial product that aids in avoiding or mitigating complement is the surface protease, designated PgtE (outer membrane serine protease) in Salmonella, and other members of the omptin family. The surface protease PgtE of S. enterica belongs to the omptin family of enterobacterial outer membrane aspartate proteases. PgtE and other omptins require rough LPS to be active, but are sterically inhibited by the O-antigen. Expression of pgtE is upregulated during the growth of Salmonella inside macrophages, and the bacteria released from macrophages exhibit strong PgtE-mediated proteolytic activity. PgtE proteolytically activates the mammalian plasma proenzyme plasminogen to plasmin, inactivates the main physiological inhibitor of plasmin, alpha 2-antiplasmin, and mediates bacterial adhesion to extracellular matrices of human cells. This way, PgtE mediates the degradation of extracellular matrix components and generates potent, localized proteolytic activity, which can promote migration of Salmonella across extracellular matrices. PgtE also degrades alpha-helical antimicrobial peptides which can be important during intracellular growth of Salmonella. The omptin Pla of Yersinia pestis is a close ortholog of PgtE and shares functions with PgtE. Pla cleaves C3, and PgtE increases serum resistance of Salmonella by cleaving complement components C3b, C4b, and C5. The gene pgtE, and orthologs thereof from other bacterial species, can be included in the immunostimulatory bacteria herein to increase resistance to complement.

[0592] It is shown herein that the effects of complement in human serum explain the failure of therapeutic immunostimulatory bacteria, such as the Salmonella strain VNP20009, which had been shown to effectively colonize tumors in rodent models. Systemic administration of VNP20009 resulted in colonization of mouse tumors (see, e.g., Clairmont et al. (2000) J. Infect. Dis. 181:1996-2002; and Bermudes et al. (2001) Biotechnol. Genet. Eng. Rev. 18:219-33); whereas systemic administration of VNP20009 in human patients resulted in very little colonization. In the Phase 1 Study in advanced melanoma patients, very little VNP20009 was detected in human tumors after a 30 minute intravenous infusion (see, Toso et al. (2002) J. Clin. Oncol. 20:142-52). Patients that entered into a follow-up study evaluating a longer, four hour infusion of VNP20009, also demonstrated a lack of detectable VNP20009 after tumor biopsy (see, Heimann et al. (2003) J. Immunother. 26:179-180). Following intratumoral administration, colonization of a derivative of VNP20009 was detected (see, Nemunaitis et al. (2003) Cancer Gene Ther. 10:737-744). Direct intratumoral administration of VNP20009 to human tumors resulted in much higher tumor colonization, indicating that human tumors can be colonized at a high level, and that the difference in tumor colonization between mice and humans occurs only after systemic administration.

[0593] It is shown and described herein, that, while not previously known to occur in wild-type S. typhimurium, VNP20009 is inactivated by human complement, which explains the low tumor colonization observed in humans upon systemic administration of VNP20009. Strains provided herein exhibit resistance to complement. They can be modified to express Rck and other proteins involved in mediating complement resistance or avoidance, such as Ail of Yersinia enterocolitica, or PgtE of Salmonella typhimurium, or, if they natively express such a protein, they can be modified to overexpress Rck and/or other such proteins. Rck can be introduced into bacteria, such as E. coli, that lack a homolog.

[0594] Rck Expression

[0595] Rck (resistance to complement killing) is a 17 kDa outer membrane protein encoded by the large virulence plasmid of Salmonella species, such as S. enteritidis and S. typhimurium, that induces adhesion to and invasion of epithelial cells. The Rck protein has been shown to protect S. enterica from complement by inhibiting C9 polymerization and subsequent assembly of a functional membrane attack complex. An rck mutant exhibited a 2-3 fold decrease in epithelial cell invasion compared to the wild-type strain, while rck overexpression in wild-type strains leads to increased invasion. The Rck protein induces cell entry by a receptor-mediated process, promoting local actin remodeling, and weak and closely adherent membrane extensions. Thus, Salmonella can enter cells by two distinct mechanisms: the Trigger mechanism mediated by the T3SS-1 complex, and a Zipper mechanism induced by rck (see, e.g., Manon et al. (2012), Salmonella, Chapter 17, eds. Annous and Gurtler, Rijeka, pp. 339-364). Expression of rck on the Salmonella virulence plasmid confers a high level of resistance to neutralization by human complement, by preventing the formation of the membrane attack complex. When the S. typhimurium virulence plasmid containing rck was expressed in a highly serum-sensitive strain of E. coli, Rck was able to restore complement resistance.

[0596] The immunostimulatory bacteria provided herein retain, or are provided with, Rck to confer resistance to human complement. It is shown herein that immunostimulatory bacteria, such as E. coli, can be modified by encoding rck on a plasmid in the bacteria to thereby confer resistance to complement. Immunostimulatory bacteria provided herein encode rck, either endogenously, or can be modified to encode it in order to increase resistance to complement. Methods for conferring resistance to complement also are provided. For example, the therapeutic E. coli species described in U.S. Patent Application Publication Nos. 2018/0325963 and 2018/0273956, and U.S. Pat. Nos. 9,889,164 and 9,688,967, can be improved by modifying the bacteria therein, such as by introducing nucleic acid encoding the Salmonella rck gene on a plasmid therein, to thereby improve or provide resistance to complement. Bacteria that are resistant to complement can be systemically administered, and sufficient bacteria can survive to be therapeutically effective. Nucleic acids encoding the Salmonella rck gene are introduced into bacteria, such as therapeutic E. coli, to thereby confer or increase complement resistance.

[0597] Other orthologs and homologs of rck from other bacterial species, similarly can be expressed in the immunostimulatory bacteria. For example, Ail is an Rck homolog from Yersinia enterocolitica, which enhances complement resistance under heterologous expression. PgtE is an S. typhimurium surface protease that has also been shown to enhance complement resistance under heterologous expression.

[0598] 8. Deletions of Genes Required for Lipoprotein Expression in Salmonella and Other Gram-Negative Bacteria

[0599] The LPS and Braun (murein) lipoprotein (Lpp) are major components of the outer membrane of Gram-negative enteric bacteria that function as potent stimulators of inflammatory and immune responses. Braun (murein) lipoprotein (Lpp) is one of the most abundant components of the outer membrane in S. typhimurium, and leads to TLR2 induction of pro-inflammatory cytokines, such as TNFα, IL-6, and IL-8 (in humans). Two functional copies of the lipoprotein gene (lppA (SEQ ID NO:387) and lppB (SEQ ID NO:388)), that are located on the bacterial chromosome of Salmonella, contribute to bacterial virulence. Deletion of the lppA and lppB genes, and elimination of lipoprotein expression, reduces virulence and decreases pro-inflammatory cytokine production (see, e.g., Sha et al. (2004) Infect. Immun. 72(7):3987-4003; and Fadl et al. (2005) Infect. Immun. 73(2):1081-1096). Deletion of the Lpp genes would be expected to reduce infection of cells, and, thus, decrease plasmid delivery and expression of the encoded therapeutic products or proteins. As shown in Example 18 below, however, while deletion of these genes did reduce tumor colonization, the amount of plasmid delivered to the targeted cells, i.e., the tumor-resident immune cells, particularly macrophages, significantly was increased. As shown herein, deletion or disruption of these genes (lppA and lppB), thus, results in decreased virulence due to the inability to survive in infected macrophages, but results in enhanced plasmid delivery by the immunostimulatory bacteria, thereby increasing the expression of encoded therapeutic genes in the targeted cells, i.e., the tumor-resident immune cells, particularly macrophages.

[0600] 9. Robust Immunostimulatory Bacteria Whose Genomes are Modified to be Optimized for Anti-Tumor Therapy, and that Encode Therapeutic Products, Including a Plurality Thereof

[0601] As described herein, bacterial strains, such as S. typhimurium strains, that are engineered to be adenosine auxotrophic, and are reduced in their ability to induce pro-inflammatory cytokines by modification of the LPS and/or deletion of flagellin, and/or are modified by deletion or elimination of L-asparaginase II expression to improve T-cell function, and/or are modified by deletion or disruption of genes required for biofilm formation, and/or that demonstrate enhanced human serum survival due to increased rck expression, are further modified to deliver therapeutic products, such as immunomodulatory proteins, and promote robust anti-tumor immune responses.

[0602] The table below summarizes the bacterial genotypes/modifications, their functional effects, and some of the effects/benefits achieved herein.

| Genotype/Modification | Functional Effect | Effect/Benefit |
|---|---|---|
| Δasd (in genome) | Plasmid maintenance | Improves plasmid delivery |
| | | Plasmid maintenance in vivo via asd |
| | | cassette on plasmid |
| ΔpurI | Purine/adenosine | Tumor-specific enrichment |
| | auxotrophy | Limited replication in healthy tissue |
| ΔmsbB | LPS surface coat | Decreases TLR4 recognition |
| | modification | Reduces immunosuppressive cytokine |
| | | profile (TNF-α) |
| | | Improves safety |
| | | Prevents intracellular replication |
| ΔfliC/ΔfljB (ΔFLG) | Flagella knockout | Removes major inflammatory and |
| | | immune-suppressive element |
| | | Eliminates TLR5 recognition |
| | | Reduces immunosuppressive cytokine |
| | | profile |
| | | Improves safety |
| | | Reduces ability to invade non- |
| | | phagocytic cells (e.g., stromal and |
| | | tumor cells) |
| ΔpagP | LPS surface coat | Removes major inflammatory and |
| | modification | immunosuppressive element |
| | | Decreases TLR4 recognition |
| | | Reduces IL-6 production |
| | | Improves safety |
| ΔansB | L-asparaginase II | Enhances tumor T-cell function |
| | knockout | |
| ΔcsgD | Removes curli | Reduces inflammation |
| | fimbriae, cellulose | Prevents possible biofilm formation |
| | production, c-di- | Enhances phagocytic cell uptake |
| | GMP | |
| Plasmid | Expresses gene | Eukaryotic promoter limits expression |
| | products under | to cells containing the plasmid |
| | control of host- | Long term expression in the TME |
| | recognized promoter | (i.e., asd encoded on plasmid under |
| | | control of host-recognized promoter) |
| | | Expression of any combination of |
| | | therapeutic product(s) with large |
| | | capacity |
| | | CpGs to induce proper viral-like |
| | | innate immune response |

[0603] Strains provided herein are ΔFLG, and/or ΔpagP, and/or ΔansB, and/or ΔcsgD. Additionally, the strains are one or more of ΔpurI (ΔpurM), AmsbB, and Δasd (in the bacterial genome). In particular, the strains are ΔpurI (ΔpurM), AmsbB, ΔpagP, ΔansB, and Δasd. The strains also can be lppA⁻ and/or lppB⁻, particularly lppA⁻/lppB⁻. The plasmid is modified to encode therapeutic products under control of host-recognized promoters (e.g., eukaryotic promoters, such as RNA polymerase II promoters, including those from eukaryotes, and from animal viruses). The plasmids can encode asd to permit bacterial replication in vivo, and can encode nucleic acids with other beneficial functions (such as CpGs), and can encode gene products, as described elsewhere herein.

[0604] The immunostimulatory bacteria provided herein can be modified to eliminate the ability to infect epithelial cells, such as by elimination of the flagella. Elimination of the ability to infect epithelial cells, as described elsewhere herein, also can be achieved by inactivating SPI-1-dependent invasion, through inactivation or knockout of one or more genes involved in the SPI-1 pathway. These genes include, but are not limited to, one more of: avrA, hilA, hilD, invA, invB, invC, invE, invF, invG, invH, InvI, invJ, iacP, iagB, spaO, spaP, spaQ, spaR, spaS, orgA, orgB, orgC, prgH, prgI, prgJ, prgK, sicA, sicP, sipA, sipB, sipC, sipD, sirC, sopB, sopD, sopE, sopE2, sprB, and sptP. Additionally or alternatively, the immunostimulatory bacteria can contain knockouts or deletions in genes to inactivate products involved in SPI-1-independent infection/invasion, such as one or more of the genes fljB, fliC, rck, pagN, hlyE, pefI, srgD, srgA, srgB, and srgC, and/or the immunostimulatory bacteria can contain knockouts or deletions to inactivate products of genes that induce cell death of tumor-resident immune cells, such as genes that encode proteins that are directly recognized by the inflammasome, including fljB, fliC, prgI (needle protein), and prgJ (rod protein). The rck gene, however, is desirable because it protects the bacteria against inactivation against complement. Bacteria that do not endogenously encode rck, can be modified to encode a heterologous rck gene.

[0605] The immunostimulatory bacteria are derived from suitable bacterial strains. Bacterial strains can be attenuated strains, or strains that are attenuated by standard methods, or that, by virtue of the modifications provided herein, are attenuated in that their ability to colonize is limited primarily to immunoprivileged tissues and organs, particularly tumor-resident immune cells, the TME, and tumor cells, including solid tumors. Bacteria include, but are not limited to, for example, strains of Salmonella, Shigella, Listeria, E. coli, and Bifidobacteria. For example, species include Shigella sonnei, Shigella flexneri, Shigella dysenteriae, Listeria monocytogenes, Salmonella typhi, Salmonella typhimurium, Salmonella gallinarum, and Salmonella enteritidis. Other suitable bacterial species include Rickettsia, Klebsiella, Bordetella, Neisseria, Aeromonas, Francisella, Corynebacterium, Citrobacter, Chlamydia, Haemophilus, Brucella, Mycobacterium, Mycoplasma, Legionella, Rhodococcus, Pseudomonas, Helicobacter, Vibrio, Bacillus, and Erysipelothrix. For example, Rickettsia rickettsii, Rickettsia prowazekii, Rickettsia tsutsugamushi, Rickettsia mooseri, Rickettsia sibirica, Bordetella bronchiseptica, Neisseria meningitidis, Neisseria gonorrhoeae, Aeromonas eucrenophila, Aeromonas salmonicida, Francisella tularensis, Corynebacterium pseudotuberculosis, Citrobacter freundii, Chlamydia pneumoniae, Haemophilus somnus, Brucella abortus, Mycobacterium intracellulare, Legionella pneumophila, Rhodococcus equi, Pseudomonas aeruginosa, Helicobacter mustelae, Vibrio cholerae, Bacillus subtilis, Erysipelothrix rhusiopathiae, Yersinia enterocolitica, Rochalimaea quintana, and Agrobacterium tumerfacium.

[0606] Exemplary of the immunostimulatory bacteria provided herein are species of Salmonella. Exemplary of bacteria for modification as described herein are wild-type strains of Salmonella, such as the strain that has all of the identifying characteristics of the strain deposited in the American Type Culture Collection (ATCC) as accession #14028. Engineered strains of Salmonella typhimurium, such as strain YS1646 (ATCC catalog #202165, also referred to as VNP20009; see, also, International PCT Application Publication No. WO 99/13053), is engineered with plasmids to complement an asd gene knockout and to allow for antibiotic-free plasmid maintenance. The strains then are modified to delete the flagellin genes, and/or to delete pagP. The combination of flagella knockout and pagP deletion renders the strains highly resistant to human serum complement. The strains also are rendered auxotrophic for purines, particularly adenosine, and are asd⁻ and msbB⁻. As exemplified, strains in which the purI and msbB genes are completely deleted are more fit (grow faster) that strain VNP20009, in which these genes are not deleted, but are modified to eliminate expression. The asd gene can be provided on a plasmid for in vivo replication in the eukaryotic host. The strains also have a modification, such as a deletion, disruption, or other modification, in the ansB gene, preventing them from producing immunosuppressive L-asparaginase II, and improving tumor T-cell function. The strains also are modified to eliminate biofilm production, such as by a csgD deletion, which renders them unable to produce curli fimbriae, cellulose, and c-di-GMP, reducing unwanted inflammatory responses, and preventing the strains from forming biofilms.

[0607] These genomic deletions and plasmids are described and exemplified elsewhere herein. Any of the nucleic acid encoding therapeutic products, such as immunostimulatory proteins and other products, described elsewhere herein and/or known to those of skill in the art, can be included on the plasmid. The plasmid generally is present in low to medium copy number, as described elsewhere herein. Therapeutic products include gain-of-function mutants of cytosolic DNA/RNA sensors, that can constitutively evoke/induce type I IFN expression, and other immunostimulatory proteins, such as cytokines, chemokines, and co-stimulatory molecules, that promote an anti-tumor immune response in the tumor microenvironment, and other such products described herein. The plasmids also can encode antibodies, and fragments thereof, e.g., single chain antibodies, that target immune checkpoints and other cancer targets, such as VEGF, IL-6, and TGF-β, and other molecules, such as bispecific T-cell engagers, or BiTEs®. The plasmids also can encode IL-6 binding decoy receptors, TGF-beta binding decoy receptors, and TGF-beta polypeptide antagonists. As described below, the plasmid can encode one or a plurality of therapeutic products/genetic payloads (i.e., multiplexed), for delivery of anti-cancer therapeutic products to the tumor/tumor microenvironment. The products can be operatively linked to trafficking signals, such as signals for secretion. The products also can be designed for expression on a cell surface, such as in tumor-resident myeloid cells.

[0608] 10. Conversion of M12 Phenotype Macrophages into M1 and M1-Like Phenotype Macrophages

[0609] As described herein, the immunostimulatory bacteria provided herein accumulate in and/or target macrophages. Macrophages are phagocytic immune cells; they play a role in clearing senescent and apoptotic cells, as well as in the phagocytosis of immune-related complexes and pathogens, and in the maintenance of homeostasis. The phenotype and function of macrophages can be polarized by the microenvironment. There are two types: M1-type (classically activated) macrophages, and M2-type (alternatively activated) macrophages.

[0610] The role of M1 macrophages is to secrete pro-inflammatory cytokines and chemokines, and to present antigens, and thus, to participate in the positive immune response, and function as immune monitors. M1 macrophages produce pro-inflammatory cytokines, including IL-6, IL-12, and TNF-α. M2 macrophages secrete arginase 1, IL-1β, TGF-β, and other anti-inflammatory cytokines, which have the function of reducing inflammation, and contributing to tumor growth and immunosuppressive function. Thus, for treatment of cancers and other such diseases and disorders, the M1 or M1-like phenotype is advantageous.

[0611] M2 macrophages can be converted into M1 macrophages or into macrophages with an M1-like phenotype. Immunostimulatory bacteria provided herein, which infect macrophages, can convert M2 macrophages into macrophages with an M1 or M1-like phenotype. M1 macrophage phenotypic markers include CD80 (also known as B7, B7.1, or BB1), CD86 (also known as B7.2), CD64 (also known as high affinity immunoglobulin gamma Fc receptor I), CD16, and CD32 (also known as low affinity immunoglobulin gamma Fc receptor IIb). Expression of nitric oxide synthase (iNOS) in M1 macrophages also can serve as a phenotypic marker. CD163 and CD206 are markers for the identification of M2 macrophages. Arginase 1 (Arg1) and DECTIN-1 also are ideal phenotypic indicators for the identification of M2 macrophages. Thus, the phenotypic conversion can be monitored or assessed by virtue of expression of these markers, or other such markers known to those of skill in the art.

[0612] Tumor-associated macrophages (TAMs) are associated with an immunosuppressive M2 phenotype. Immunostimulatory bacteria provided herein can convert such macrophages into macrophages with an M1 or M1-like phenotype. The immunostimulatory bacteria provided herein, that encode a therapeutic product that leads to expression of type I interferon (IFN), can effect such conversion. This is a property unique to the immunostimulatory bacteria provided herein, and exploits the ability of the bacteria that include genomic modifications that result in the infection of macrophages. The encoded therapeutic products include those that are part of a cytosolic DNA/RNA sensor pathway, such as the STING variants (described in detail herein). The encoding immunostimulatory bacteria can effect conversion of the macrophages and any other infected immune cells to an M1 phenotype (or an M1-like phenotype) upon infection of the tumor-resident macrophages, and the expression of the encoded therapeutic product(s), including any as described herein. This ability to convert macrophage phenotypes is demonstrated and exemplified in Example 12 below. The expression of a modified STING protein by immunostimulatory bacteria provided herein that infect macrophages and express the STING protein, converts the phenotype of M1 macrophages to M2 macrophages.

[0613] Immunostimulatory bacteria provided herein, that include genome modifications as described herein, such as the elimination of flagella and LPS modification, convert infected M2 macrophages into those that induce cytokine profiles of M1 macrophages. Immunostimulatory bacteria that express a variant STING protein that results in constitutive type I IFN expression in human primary M2 macrophages, convert these cells to M1-like (having phenotypic markers and/or expression profiles typical of M1 macrophages) type I IFN producing cells.

[0614] The Examples demonstrate this change from an M2 to an M1-like or M1 phenotype. A comparison between the cytokine profiles in uninfected M2 macrophages, with the induced cytokines in M2 macrophages infected with a Salmonella strain that is Δasd/ΔFLG/ΔpagP/ΔansB/ΔcsgD, showed that M2 macrophages induce high levels of IFNγ, CXCL10, and CXCL11 secretions. For example, infection of macrophages with the same strain that was transformed with plasmids encoding the huSTING N154S/R284G tazCTT variant, or encoding wild-type (WT) huIL-12 and the huSTING N154S/R284G tazCTT variant, or encoding WT huIL-15, induced higher CXCL10 and CXCL11 secretions, than infection with the untransformed ΔFLG/ΔpagP/ΔansB/ΔcsgD strain not containing a plasmid. Cytokine profiles, characteristic of M1 or M1-like phenotypes, were induced with a variety of different payloads encoded by the bacterial strains. Results demonstrating this conversion are detailed in the Examples (see, e.g., Example 23).

### D. Immunostimulatory Bacteria with Enhanced Therapeutic Index Encoding Genetic Payloads that Stimulate the Immune Response in the Tumor Microenvironment

[0615] The immunostimulatory bacteria provided herein are modified so that they accumulate in the tumor microenvironment, and in tumor-resident myeloid cells, where encoded therapeutic products, under the control of eukaryotic promoters, are expressed. The bacteria encode therapeutic products, particularly anti-cancer products, including products that stimulate the immune system and/or that reverse or mitigate the immunosuppressive effects of tumors. As described herein, the bacteria can encode a plurality of products, where expression of each product is under the control of a separate promoter, or expression of the products is under the control of one promotor, and the expression cassette encoding the products can include sequences that result in expression of the discrete products, and, where appropriate, includes regulatory sequences to ensure secretion of the encoded products into the tumor microenvironment. The immunostimulatory bacteria express encoded therapeutic products on the plasmid. As described herein, the plasmid can encode one product, or a plurality thereof. Each product can be expressed under the control of a different eukaryotic promoter, or multiple encoded products can be expressed under the control of a single promoter, such as by including 2A self-cleaving peptides between the coding portions, such as T2A (SEQ ID NO:327), P2A (SEQ ID NO:328), E2A (SEQ ID NO:329), and F2A (SEQ ID NO:330), or variants thereof that have at least 95%, 96%, 97%, 98%, or 99% sequence identity thereto and that result in expression of discrete products, or other variants or other such regulatory sequences known to those of skill in the art. The encoded products include those described herein, and they can be anti-cancer immune stimulating products whose activities are complementary. The immunostimulatory bacteria provided herein permit the combinatorial administration of multiple immunomodulatory products or payloads (multiplexed payloads) that would otherwise be too toxic if systemically administered. Exemplary of multiplexed payloads include one or more cytokine(s), an immunostimulatory protein to stimulate or induce expression of type I IFN, such as STING or a variant thereof that has increased activity or that is constitutively active, and a co-stimulatory molecule, such as an engineered 4-1BBL co-stimulatory molecule. Provided herein is a modified 4-1BBL polypeptide, and encoding nucleic acid, that exhibits improved expression and activity when encoded on a plasmid in the immunostimulatory bacteria provided herein that deliver the plasmids to myeloid cells for expression under control of the host transcriptional and translational machinery.

[0616] The immunostimulatory bacteria provided herein have strong anti-tumor effects, including provision of cures, such as after IV dosing with the multiplexed payloads or single agent payloads. The immunostimulatory bacteria, when systemically administered, infiltrate and enrich in solid tumors, in the TME, and in tumor-resident myeloid cells, in which the encoded therapeutic products are expressed and then locally delivered to the tumor microenvironment. Upon consumption (phagocytosis) by tumor-resident myeloid cells, the bacteria deliver a genetic payload-encoding plasmid, which allows for ectopic, single or multiplexed payload expression in a tumor-specific manner.

[0617] 1. Immunostimulatory Proteins

[0618] The immunostimulatory bacteria herein can be modified to encode one or more of an immunostimulatory protein that promotes, induces, or enhances an anti-tumor response. As exemplified and described in the Examples, the order in which the encoding nucleic acids are arranged on the plasmid can improve overall expression, and modifications to the plasmids can improve the fitness of the bacteria that contain the plasmids encoding the proteins.

[0619] The immunostimulatory protein(s) can be encoded on a plasmid in the bacterium, under the control of a eukaryotic promoter, such as a promoter recognized by RNA polymerase II, for expression in a eukaryotic subject, particularly the subject for whom the immunostimulatory bacterium is to be administered, such as a human. The nucleic acid encoding the immunostimulatory protein(s) can include, in addition to the eukaryotic promoter, other regulatory signals for expression or trafficking in the cells, such as for secretion or expression on the surface of a cell.

[0620] Immunostimulatory proteins are those that, in the appropriate environment, such as a tumor microenvironment (TME), can promote, or participate in, or enhance, an anti-tumor response by the subject to whom the immunostimulatory bacterium is administered. Immunostimulatory proteins include, but are not limited to, cytokines, chemokines, and co-stimulatory molecules. These include cytokines, such as, but not limited to, IL-2, IL-7, IL-12, IL-15, IL-18, IL-21, IL-23, IL-12p70 (IL-12p40+IL-12p35), IL-15/IL-15R alpha chain complex, IL-36γ, GM-CSF, IFNα, IFNβ, IL-2 that has attenuated binding to IL-2Ra, and IL-2 that is modified so that it does not bind to IL-2Ra; chemokines, such as, but not limited to, CCL3, CCL4, CCL5, CXCL9, CXCL10, and CXCL11; and/or co-stimulatory molecules, such as, but not limited to, CD40, CD40L, OX40, OX40L, 4-1BB, 4-1BBL, 4-1BBL with the cytoplasmic domain truncated or deleted (4-1BBLΔcyt), members of the TNF/TNFR superfamily (e.g., CD27 and CD27L), and members of the B7-CD28 family (e.g., CD80, CD86, ICOS, and ICOS ligand (B7RP1)).

[0621] Other such immunostimulatory proteins, that are used for the treatment of tumors, or that can promote, enhance or otherwise increase or evoke an anti-tumor response, that are known to those of skill in the art, are contemplated for encoding in/delivery by the immunostimulatory bacteria provided herein. For example, the immunostimulatory bacteria can deliver a genetic payload encoding a truncated co-stimulatory molecule (e.g., 4-1BBL, CD80, CD86, CD27L, B7RP1, and OX40L), with a full or partial cytoplasmic domain deletion, for expression on an APC, where the truncated gene product is capable of constitutive immuno-stimulatory signaling to a T-cell through co-stimulatory receptor engagement, and is unable to counter-regulatory signal to the APC due to a deleted or truncated cytoplasmic domain. As described elsewhere herein, the modified truncated cytoplasmic domain, for example, of 4-1BBL, contains particular residues to ensure proper orientation of the protein domains, which increases expression of the protein. Deletion (full or partial) and modification of the cytoplasmic domain of co-stimulatory molecules, as described herein, potentiates the activation of the co-stimulatory molecule, without the immunosuppressive reverse signaling. This is exemplified with respect to 4-1BBL as described in the Examples and as follows; the same modifications, including replacement of residues in the truncated cytoplasmic domain to ensure proper orientation in the membrane, can be applied to any of the co-stimulatory molecules, as well as other transmembrane polypeptides.

[0622] The full-length sequence of human 4-1BBL (SEQ ID NO:389 see also, Uniprot P41273) is:

MEYASDASLDPEAPWPPAPRARACRVLPWALVAGLLLLLLLAAACAVFL
ACPWAVSGARASPGSAASPRLREGPELSPDDPAGLLDLRQGMFAQLVAQ
NVLLIDGPLSWYSDPGLAGVSLTGGLSYKEDTKELVVAKAGVYYVFFQL
ELRRVVAGEGSGSVSLALHLQPLRSAAGAAALALTVDLPPASSEARNSA
FGFQGRLLHLSAGQRLGVHLHTEARARHAWQLTQGATVLGLFRVTPEIP
AGLPSPRSE.

where the ctoplasmic domain corresponds to amino acids 1-28 (italicized), the transmembrane domain corresponds to amino acids 29-49 (bold), and the extracellular domain corresponds to amino acids 50-254 (underlined). The human 4-1BBLΔcyt sequence (see, SEQ ID NO:390) is:

MWALVAGLLLLLLLAAACAVFLACPWAVSGARASPGSAASPRLREGPEL
SPDDPAGLLDLRQGMFAQLVAQNVLLIDGPLSWYSDPGLAGVSLTGGLS
YKEDTKELVVAKAGVYYVFFQLELRRVVAGEGSGSVSLALHLQPLRSAA
GAAALALTVDLPPASSEARNSAFGFQGRLLHLSAGQRLGVHLHTEARAR
HAWQLTQGATVLGLFRVTPEIPAGLPSPRSE.

which is the same as the full-length protein, but lacking the cytoplasmic domain, so that the transmembrane domain corresponds to amino acid residues 2-22 (bold), and the extracellular domain corresponds to amino acid residues 23-227 (underlined).

[0623] An exemplary human 4-1BBL, with a truncated cytoplasmic domain is as follows (see, SEQ ID NO:391):

MRVLPWALVAGLLLLLLLAAACAVFLACPWAVSGARASPGSAASPRLRE
GPELSPDDPAGLLDLRQGMFAQLVAQNVLLIDGPLSWYSDPGLAGVSLT
GGLSYKEDTKELVVAKAGVYYVFFQLELRRVVAGEGSGSVSLALHLQPL
RSAAGAAALALTVDLPPASSEARNSAFGFQGRLLHLSAGQRLGVHLHTE
ARARHAWQLTQGATVLGLFRVTPEIPAGLPSPRSE.

where the truncated cytoplasmic domain corresponds to residues RVLP (in italics), with the initiating M, the transmembrane domain corresponds to residues 6-26 (bold), and the extracellular domain corresponds to residues 27-231 (underlined).

[0624] With respect to the full-length 4-1BBL, positively charged amino acids, such as R and K, tend to be positioned in the cytoplasm (inside/cytoplasmic domain), which orients the transmembrane domain so that N-terminus is inside. But when the cytoplasmic domain is truncated, this alters the charge balance, so that there are only positive charges on the outside (in the extracellular domain). This favors a configuration in which the N-terminus of the protein is on the outside, not towards the cytoplasm, resulting in an “inside out configuration.” If this is observed, such as by apparent lower activity or expression or other parameters, the 4-1BBL variant with the truncated cytoplasmic domain can be modified to include positive residues, to ensure the proper orientation of the protein in the cell membrane upon expression. Exemplary of possible modifications of 4-1BBL are those in which residues are replaced with positively charged residues, or a c-myc tag is included. The skilled person can envision other similar replacements/additions to achieve the same result.

[0625] Exemplary modified human 4-1BBL variants with a truncated cytoplasmic domain include the following, in which extra positive residues (Arginine (R), Lysine (K), italicized) are included in the cytoplasmic domain region, as follows, so that the resulting protein, when expressed in a cell, is properly oriented (has the correct configuration and not the “inside out” configuration). See, SEQ ID NOs:391 and 392, respectively:

### Truncated Cytoplasmic Domain:

MRVLPWALVAGLLLLLLLAAACAVFLACPWAVSGARASPGSAASPRLRE
GPELSPDDPAGLLDLRQGMFAQLVAQNVLLIDGPLSWYSDPGLAGVSLT
GGLSYKEDTKELVVAKAGVYYVFFQLELRRVVAGEGSGSVSLALHLQPL
RSAAGAAALALTVDLPPASSEARNSAFGFQGRLLHLSAGQRLGVHLHTE
ARARHAWQLTQGATVLGLFRVTPEIPAGLPSPRSE

This adds a positive charge back to the N-terminus (R), which favors a configuration in which the N-terminus is correctly oriented inside the cytoplasm. In another example a MYC tag is added.
Truncated Cytoplasmic Domain with a MYC Tag:

MEQKLISEEDLRVLPWALVAGLLLLLLLAAACAVFLACPWAVSGARASP
GSAASPRLREGPELSPDDPAGLLDLRQGMFAQLVAQNVLLIDGPLSWY
SDPGLAGVSLTGGLSYKEDTKELVVAKAGVYYVFFQLELRRVVAGEGS
GSVSLALHLQPLRSAAGAAALALTVDLPPASSEARNSAFGFQGRLLHL
SAGQRLGVHLHTEARARHAWQLTQGATVLGLFRVTPEIPAGLPSPRSE

[0627] For sequences of full-length mouse 4-1BBL, and exemplary sequences of mu4-1BBLΔcyt (murine 4-1BBL with a deletion of the cytoplasmic domain), mu4-1BBL with a truncated cytoplasmic domain, and mu4-1BBL with a truncated cytoplasmic domain and a MYC tag, see Example 19 below; see, also, SEQ ID NOs:393-396, respectively.

[0628] Additional or alternative amino acid replacements can be included in the co-stimulatory molecules to ensure proper orientation of the expressed protein in the membrane. The skilled person readily can prepare other similar modifications to ensure proper orientation of a transmembrane protein with a truncated cytoplasmic domain.

[0629] In addition to deletion or truncation of the cytoplasmic domain, co-stimulatory molecules (e.g., 4-1BBL, CD80, CD86, CD27L, B7RP1, and OX40L), for expression on an APC, also can be modified by introducing amino acid modifications, such as insertions, deletions, and/or replacements, to the cytoplasmic domain, such that the modified gene product is capable of constitutive immuno-stimulatory signaling to a T-cell through co-stimulatory receptor engagement, and is unable to counter-regulatory signal to the APC due to the modifications to the cytoplasmic domain. For example, the immunosuppressive reverse (intracellular) signaling can be eliminated by modifying the cytoplasmic domain phosphorylation sites, such as by replacing one or more Ser residues, at an appropriate locus or loci, with a residue that reduces or eliminates reverse signaling. For example, for human 4-1BBL, the immunosuppressive reverse (intracellular) signaling can be eliminated by modifying the cytoplasmic domain phosphorylation sites, including Ser5 and Ser8, with reference to the sequence of full-length human 4-1BBL (SEQ ID NO:389). The serine residues in the cytoplasmic domain can be replaced by any other residue that reduces or eliminates reverse signaling.

[0630] Additional or alternative amino acid replacements can be included in the co-stimulatory molecules to eliminate immunosuppressive intracellular (reverse) signaling. The skilled person readily can prepare other similar modifications to eliminate immunosuppressive reverse signaling, while still maintaining the co-stimulatory molecule's ability to activate constitutive immuno-stimulatory signaling to a T-cell through co-stimulatory receptor engagement.

[0631] a. Cytokines and Chemokines

[0632] In some embodiments, the immunostimulatory bacteria herein are engineered to express cytokines to stimulate the immune system, including, but not limited to, for example, IL-2, IL-7, IL-12, IL-12p70 (IL-12p40+IL-12p35), IL-15 (and the IL-15/IL-15R alpha chain complex), IL-18, IL-21, IL-23, IL-36γ, IL-2 that has attenuated binding to IL-2Ra, IL-2 that is modified so that it does not bind to IL-2Ra, IFN-α, and IFN-β. Cytokines stimulate immune effector cells and stromal cells at the tumor site, and enhance tumor cell recognition by cytotoxic cells. In some embodiments, the immunostimulatory bacteria can be engineered to express chemokines, such as, for example, CCL3, CCL4, CCL5, CXCL9, CXCL10, and CXCL11.

[0633] IL-2

[0634] Interleukin-2 (IL-2), which was the first cytokine approved for the treatment of cancer, is implicated in the activation of the immune system by several mechanisms, including the activation and promotion of cytotoxic T lymphocyte (CTL) growth, the generation of lymphokine-activated killer (LAK) cells, the promotion of regulatory T-cell (Treg cell) growth and proliferation, the stimulation of tumor-infiltrating lymphocytes (TILs), and the promotion of T-cell, B cell, and NK cell proliferation and differentiation. Recombinant IL-2 (rIL-2) is FDA-approved for the treatment of metastatic renal cell carcinoma (RCC) and metastatic melanoma (see, e.g., Sheikhi et al. (2016) Iran J. Immunol. 13(3):148-166).

[0635] IL-7

[0636] IL-7, which is a member of the IL-2 superfamily, is implicated in the survival, proliferation, and homeostasis of T-cells. Mutations in the IL-7 receptor have been shown to result in the loss of T-cells, and the development of severe combined immunodeficiency disease (SCID), highlighting the critical role that IL-7 plays in T-cell development. IL-7 is a homeostatic cytokine that provides continuous signals to resting naïve and memory T-cells, and which accumulates during conditions of lymphopenia, leading to an increase in both T-cell proliferation and T-cell repertoire diversity. In comparison to IL-2, IL-7 is selective for expanding CD8⁺ T-cells over CD4⁺FOXP3⁺ regulatory T-cells. Recombinant IL-7 has been shown to augment antigen-specific T-cell responses following vaccination, and adoptive cell therapy in mice. IL-7 also can play a role in promoting T-cell recovery following chemotherapy of hematopoietic stem cell transplantation. Early phase clinical trials on patients with advanced malignancy have shown that recombinant IL-7 is well-tolerated and has limited toxicity at biologically active doses (i.e., in which the numbers of circulating CD4⁺ and CD8⁺ T-cells is increased by 3-4 fold) (see, e.g., Lee, S. and Margolin, K. (2011) Cancers 3:3856-3893). IL-7 has been shown to possess antitumor effects in tumors, such as gliomas, melanomas, lymphomas, leukemia, prostate cancer, and glioblastoma, and the in vivo administration of IL-7 in murine models resulted in decreased cancer cell growth. IL-7 also has been shown to enhance the antitumor effects of IFN-γ in rat glioma tumors, and to induce the production of IL-1α, IL-1β, and TNF-α by monocytes, which results in the inhibition of melanoma growth. Additionally, administration of recombinant IL-7 following the treatment of pediatric sarcomas resulted in the promotion of immune recovery (see, e.g., Lin et al. (2017) Anticancer Research 37:963-968).

[0637] IL-12 (IL-12p70 (IL-12p40+IL-12p35))

[0638] Bioactive IL-12 (IL-12p70), which promotes cell-mediated immunity, is a heterodimer, composed of p35 and p40 subunits, whereas IL-12p40 monomers and homodimers act as IL-12 antagonists. IL-12, which is secreted by antigen-presenting cells, promotes the secretion of IFN-γ from NK and T-cells, inhibits tumor angiogenesis, results in the activation and proliferation of NK cells, CD8⁺ T-cells, and CD4⁺ T-cells, enhances the differentiation of naïve CD4⁺ T-cells into Th1 cells, and promotes antibody-dependent cell-mediated cytotoxicity (ADCC) against tumor cells. IL-12 has been shown to exhibit anti-tumor effects in murine models of melanoma, colon carcinoma, mammary carcinoma, and sarcoma (see, e.g., Kalinski et al. (2001) Blood 97:3466-3469; Sheikhi et al. (2016) Iran J. Immunol. 13(3):148-166; and Lee, S. and Margolin, K. (2011) Cancers 3:3856-3893).

[0639] IL-15 and IL-15:IL-15Ra (IL-15/IL-15Rα)

[0640] IL-15 is structurally similar to IL-2, and while both IL-2 and IL-15 provide early stimulation for the proliferation and activation of T-cells, IL-15 blocks IL-2 induced apoptosis, which is a process that leads to the elimination of stimulated T-cells and the induction of T-cell tolerance, limiting memory T-cell responses, and potentially limiting the therapeutic efficacy of IL-2 alone. IL-15 also supports the persistence of memory CD8⁺ T-cells for maintaining long-term anti-tumor immunity, and has demonstrated significant anti-tumor activity in pre-clinical murine models via the direct activation of CD8⁺ effector T-cells in an antigen-independent manner. In addition to CD8⁺ T-cells, IL-15 is responsible for the development, proliferation, and activation of effector natural killer (NK) cells (see, e.g., Lee, S. and Margolin, K. (2011) Cancers 3:3856-3893; and Han et al. (2011) Cytokine 56(3):804-810).

[0641] IL-15 and IL-15 receptor alpha (IL-15Rα) are coordinately expressed by antigen-presenting cells, such as monocytes and dendritic cells, and IL-15 is presented in trans by IL-15Ra to the IL-15βyc receptor complex expressed on the surfaces of CD8⁺ T-cells and NK cells. Soluble IL-15:IL15-Rα (IL-15/IL-15Rα) complexes have been shown to modulate immune responses via the IL-15βyc complex, and the biological activity of IL-15 has been shown to be increased 50-fold by administering it in a preformed complex of IL-15 and soluble IL-15Rα, which has an increased half-life compared to IL-15 alone. This significant increase in the therapeutic efficacy of IL-15 by pre-association with IL-15Ra has been demonstrated in murine tumor models (see, e.g., Han et al. (2011) Cytokine 56(3):804-810).

[0642] IL-18

[0643] IL-18 induces the secretion of IFN-γ by NK and CD8⁺ T-cells, enhancing their toxicity. IL-18 also activates macrophages and stimulates the development of Th1 helper CD4⁺ T-cells. IL-18 has shown promising anti-tumor activity in several preclinical mouse models. For example, administration of recombinant IL-18 (rIL-18) resulted in the regression of melanoma or sarcoma in syngeneic mice through the activation of CD4⁺ T-cells and/or NK cell-mediated responses. Other studies showed that IL-18 anti-tumor effects were mediated by IFN-γ, and involved antiangiogenic mechanisms. The combination of IL-18 with other cytokines, such as IL-12, or with co-stimulatory molecules, such as CD80, enhances the IL-18-mediated anti-tumor effects. Phase I clinical trials in patients with advanced solid tumors and lymphomas showed that IL-18 administration was safe, and that it resulted in immune modulatory activity and in the increase of serum IFN-γ and GM-CSF levels in patients, and in modest clinical responses. Clinical trials showed that IL-18 can be combined with other anti-cancer therapeutic agents, such as monoclonal antibodies, cytotoxic drugs, or vaccines (see, e.g., Fabbi et al. (2015) J. Leukoc. Biol. 97:665-675; and Lee, S. and Margolin, K. (2011) Cancers 3:3856-3893).

[0644] It was found that an attenuated strain of Salmonella typhimurium, engineered to express IL-18, inhibited the growth of subcutaneous (S.C.) tumors or pulmonary metastases in syngeneic mice without any toxic effects following systemic administration. Treatment with this engineered bacterium induced the accumulation of T-cells, NK cells, and granulocytes in tumors, and resulted in the intratumoral production of cytokines (see, e.g., Fabbi et al. (2015) J. Leukoc. Biol. 97:665-675).

[0645] Chemokines

[0646] Chemokines are a family of small cytokines that mediate leukocyte migration to areas of injury or inflammation, and that are involved in mediating immune and inflammatory responses. Chemokines are classified into four subfamilies, based on the position of cysteine residues in their sequences, namely XC-, CC-, CXC-, and CX3C-chemokine ligands, or XCL, CCL, CXCL, and CX3CL. The chemokine ligands bind to their cognate receptors and regulate the circulation, homing, and retention of immune cells, with each chemokine ligand-receptor pair selectively regulating a certain type of immune cell. Different chemokines attract different leukocyte populations, and form a concentration gradient in vivo, with attracted immune cells moving through the gradient towards the higher concentration of chemokine (see, e.g., Argyle D. and Kitamura, T. (2018) Front. Immunol. 9:2629; and Dubinett et al. (2010) Cancer J. 16(4):325-335). Chemokines can improve the anti-tumor immune response by increasing the infiltration of immune cells into the tumor, and facilitating the movement of antigen-presenting cells (APCs) to tumor-draining lymph nodes, which primes naïve T-cells and B cells (see, e.g., Lechner et al. (2011) Immunotherapy 3(11):1317-1340). The immunostimulatory bacteria provided herein can be engineered to encode chemokines, including, but not limited to, CCL3, CCL4, CCL5, CXCL9, CXCL10, and CXCL11.

[0647] CCL3, CCL4, CCL5

[0648] CCL3, CCL4, and CCL5 share a high degree of homology, and bind to CCR5 (CCL3, CCL4, and CCL5) and CCR1 (CCL3 and CCL5) on several cell types, including immature DCs and T-cells, in both humans and mice. Therapeutic T-cells have been shown to induce chemotaxis of innate immune cells to tumor sites, via the tumor-specific secretion of CCL3, CCL4, and CCL5 (see, e.g., Dubinett et al. (2010) Cancer J. 16(4):325-335).

[0649] The induction of the T helper cell type 1 (Th1) response releases CCL3. In vivo and in vitro studies of mice have indicated that CCL3 is chemotactic for both neutrophils and monocytes; specifically, CCL3 can mediate myeloid precursor cell (MPC) mobilization from the bone marrow, and has MPC regulatory and stimulatory effects. Human ovarian carcinoma cells transfected with CCL3 showed enhanced T-cell infiltration and macrophages within the tumor, leading to an improved anti-tumor response, and indicated that CCL3-mediated chemotaxis of neutrophils suppressed tumor growth. DCs transfected with the tumor antigen human melanoma-associated gene (MAGE)-1 that were recruited by CCL3 exhibited superior anti-tumor effects, including increased lymphocyte proliferation, cytolytic capacity, and survival, and decreased tumor growth, in a mouse model of melanoma. A combinatorial use of CCL3 with an antigen-specific platform for MAGE-1 has also been used in the treatment of gastric cancer. CCL3 production by CT26, a highly immunogenic murine colon tumor, slowed in vivo tumor growth; this process was driven by the CCL3-dependent accumulation of natural killer (NK) cells, and thus, IFNγ, resulting in the production of CXCL9 and CXLC10 (see, e.g., Allen et al. (2017) Oncoimmunology 7(3):e1393598; and Schaller et al. (2017) Expert Rev. Clin. Immunol. 13(11):1049-1060).

[0650] CCL3 has been used as an adjuvant for the treatment of cancer. Administration of a CCL3 active variant, ECI301, after radiofrequency ablation in mouse hepatocellular carcinoma increased tumor-specific responses, and this mechanism was further shown to be dependent on the expression of CCR1. CCL3 has also shown success as an adjuvant in systemic cancers, whereby mice vaccinated with CCL3 and IL-2 or granulocyte-macrophage colony-stimulating factor (GM-CSF), in a model of leukemia/lymphoma, exhibited increased survival (see, e.g., Schaller et al. (2017) Expert Rev. Clin. Immunol. 13(11):1049-1060).

[0651] CCL3 and CCL4 play a role in directing CD8⁺ T-cell infiltration into primary tumor sites in melanoma and colon cancers. Tumor production of CCL4 leads to the accumulation of CD103⁺ DCs; suppression of CCL4 through a WNT/β-catenin-dependent pathway prevented CD103⁺ DC infiltration of melanoma tumors (see, e.g., Spranger et al. (2015) Nature 523(7559):231-235). CCL3 was also shown to enhance CD4⁺ and CD8⁺ T-cell infiltration to the primary tumor site in a mouse model of colon cancer (see, e.g., Allen et al. (2017) Oncoimmunology 7(3):e1393598).

[0652] The binding of CCL3 or CCL5 to their receptors (CCR1 and CCR5), moves immature DCs, monocytes, and memory and T effector cells from the circulation into sites of inflammation or infection. For example, CCL5 expression in colorectal tumors contributes to T lymphocyte chemoattraction and survival. CCL3 and CCL5 have been used alone or in combination therapy to induce tumor regression and immunity in several preclinical models. For example, studies have shown that the subcutaneous injection of Chinese hamster ovary cells genetically modified to express CCL3, resulted in tumor inhibition and neutrophilic infiltration. In another study, a recombinant oncolytic adenovirus expressing CCL5 (Ad-RANTES-E1A) resulted in primary tumor regression, and blocked metastasis in a mammary carcinoma murine model (see, e.g., Lechner et al. (2011) Immunotherapy 3(11):1317-1340).

[0653] In a translational study of colorectal cancer, CCL5 induced an “antiviral response pattern” in macrophages. As a result of CXCR3-mediated migration of lymphocytes at the invasive margin of liver metastases in colorectal cancer, CCL5 is produced. Blockade of CCR5, the CCL5 receptor, results in tumor death, driven by macrophages producing IFN and reactive oxygen species. While macrophages are present in the tumor microenvironment, CCR5 inhibition induces a phenotypic shift from an M2 to an M1 phenotype. CCR5 blockade also leads to clinical responses in colorectal cancer patients (see, e.g., Halama et al. (2016) Cancer Cell 29(4):587-601).

[0654] CCL3, CCL4, and CCL5 can be used for treating conditions, including lymphatic tumors, bladder cancer, colorectal cancer, lung cancer, melanoma, pancreatic cancer, ovarian cancer, cervical cancer, or liver cancer (see, e.g., U.S. Patent Publication No. US 2015/0232880; and International Application Publication Nos. WO 2015/059303, WO 2017/043815, WO 2017/156349, and WO 2018/191654).

[0655] CXCL9, CXCL10, CXCL11

[0656] CXCL9 (MIG), CXCL10 (IP10), and CXCL11 (ITAC) are induced by the production of IFN-γ. These chemokines bind CXCR3, preferentially expressed on activated T-cells, and function both angiostatically, and in the recruitment and activation of leukocytes. Prognosis in colorectal cancer is strongly correlated to tumor-infiltrating T-cells, particularly Th1 and CD8⁺ effector T-cells; high intratumoral expression of CXCL9, CXCL10, and CXCL11 is indicative of good prognosis. For example, in a sample of 163 patients with colon cancer, those with high levels of CXCL9 or CXCL11 showed increased post-operative survival, and patients with high CXC expression had significantly higher numbers of CD3⁺ T-cells, CD4⁺ T-helper cells, and CD8⁺ cytotoxic T-cells. In liver metastases of colorectal cancer patients, CXCL9 and CXCL10 levels were increased at the invasive margin, and correlated with effector T-cell density. The stimulation of lymphocyte migration via the action of CXCL9 and CXCL10 on CXCR3 leads to the production of CCL5 at the invasive margin (see, e.g., Halama et al. (2016) Cancer Cell 29(4):587-601; and Kistner et al. (2017) Oncotarget 8(52):89998-90012).

[0657] In vivo, CXCL9 functions as a chemoattractant for tumor-infiltrating lymphocytes (TILs), activated peripheral blood lymphocytes, natural killer (NK) cells, and Th1 lymphocytes. CXCL9 also is critical for T-cell-mediated suppression of cutaneous tumors. For example, when combined with systemic IL-2, CXCL9 has been shown to inhibit tumor growth via the increased intratumoral infiltration of CXCR3⁺ mononuclear cells. In a murine model of colon carcinoma, a combination of the huKS1/4-IL-2 fusion protein with CXCL9 gene therapy achieved a superior anti-tumor effect and prolonged lifespan through the chemoattraction and activation of CD8⁺ and CD4⁺ T lymphocytes (see, e.g., Dubinett et al. (2010) Cancer J. 16(4):325-335; and Ruehlmann et al. (2001) Cancer Res. 61(23):8498-8503).

[0658] CXCL10, produced by activated monocytes, fibroblasts, endothelial cells, and keratinocytes, is chemotactic for activated T-cells, and can act as an inhibitor of angiogenesis in vivo. Expression of CXCL10 in colorectal tumors has been shown to contribute to cytotoxic T lymphocyte chemoattraction and longer survival. The administration of immunostimulatory cytokines, such as IL-12, has been shown to enhance the anti-tumor effects generated by CXCL10. A dendritic cell (DC) vaccine primed with a tumor cell lysate, and transfected with CXCL10, had increased immunological protection and effectiveness in mice; the animals showed a resistance to a tumor challenge, a slowing of tumor growth, and longer survival time. In vivo and in vitro studies in mice using the CXCL10-mucin-GPI fusion protein resulted in tumors with higher levels of recruited NK cells compared to tumors not treated with the fusion protein. Interferons (which can be produced by plasmacytoid dendritic cells; these cells are associated with primary melanoma lesions and can be recruited to a tumor site by CCL20) can act on tumor DC subsets, for example, CD103⁺ DCs, which have been shown to produce CXCL9/10 in a mouse melanoma model, and have been associated with CXCL9/10 in human disease. CXCL10 also has shown higher expression in human metastatic melanoma samples relative to primary melanoma samples. Therapeutically, adjuvant IFN-α melanoma therapy upregulates CXCL10 production, whereas the chemotherapy agent cisplatin induces CXCL9 and CXCL10 (see, e.g., Dubinett et al. (2010) Cancer J. 16(4):325-335; Kuo et al. (2018) Front. Med. (Lausanne) 5:271; Li et al. (2007) Scand. J. Immunol. 65(1):8-13; and Muenchmeier et al. (2013) PLoS One 8(8):e72749).

[0659] CXCL10/11 and CXCR3 expression has been established in human keratinocytes derived from basal cell carcinomas (BCCs). CXCL11 also is capable of promoting immunosuppressive indoleamine 2,3-dioxygenase (IDO) expression in human basal cell carcinoma, as well as enhancing keratinocyte proliferation, which could reduce the anti-tumor activity of any infiltrating CXCR3⁺ effector T-cells (see, e.g., Kuo et al. (2018) Front. Med. (Lausanne) 5:271).

[0660] CXCL9, CXCL10 and CXCL11 can be encoded in oncolytic viruses for treating cancer (see, e.g., U.S. Patent Publication No. 2015/0232880; and International Application Publication No. WO 2015/059303). Pseudotyped oncolytic viruses or a genetically engineered bacterium encoding the gene for CXCL10 also can be used to treat cancer (see, e.g., International Application Publication Nos. WO 2018/006005 and WO 2018/129404).

[0661] b. Co-Stimulatory Molecules

[0662] Co-stimulatory molecules enhance the immune response against tumor cells, and co-stimulatory pathways are inhibited by tumor cells to promote tumorigenesis. The immunostimulatory bacteria herein can be engineered to express co-stimulatory molecules, such as, for example, CD40, CD40L, 4-1BB, 4-1BBL, 4-1BBL with a deletion of the cytoplasmic domain (4-1BBLΔcyt), 4-1BBL with a truncated cytoplasmic domain, OX40 (CD134), OX40L (CD252), other members of the TNFR superfamily (e.g., CD27, CD27 ligand, GITR, CD30, Fas receptor, TRAIL-R, TNF-R, HVEM, and RANK), B7, CD80, CD86, ICOS, ICOS ligand (B7RP1), and CD28. Additionally, the immunostimulatory bacteria can encode and express truncated co-stimulatory molecules (e.g., 4-1BBL, CD80, CD86, CD27L, B7RP1, OX40L), with a full or partial (complete, or truncated, or modified to ensure proper orientation when expressed in a cell) cytoplasmic domain deletion, for expression on an antigen-presenting cell (APC). It is shown herein that the gene product with a truncated cytoplasmic domain, including a full deletion, exhibits constitutive immunostimulatory signaling to a T-cell through co-stimulatory receptor engagement, and is unable to counter-regulatory signal to the APC due to a truncated or deleted (or otherwise modified as described herein) cytoplasmic domain. The truncation is sufficient to provide the signaling, and for the modified co-stimulatory molecule to be unable to counter-regulatory signal to the APC. The complete or partial deletion of the cytoplasmic domain of a co-stimulatory molecule, as described herein, potentiates the activation of the co-stimulatory molecule, without the immunosuppressive reverse signaling. The partial deletion (or truncation) of the cytoplasmic domain is a sufficient deletion to achieve these effects, without affecting the expression of the co-stimulatory molecule, or the orientation of the expressed co-stimulatory molecule.

[0663] The co-stimulatory molecules also can be modified to eliminate or reduce the immunosuppressive intracellular/reverse signaling by modifications to the amino acids in the cytoplasmic domain, including insertions, deletions, and/or replacements. In particular, the co-stimulatory molecules are modified by modification, such as by replacement, of cytoplasmic domain phosphorylation sites. For example, replacing one or more Ser residues at an appropriate locus or loci, such as, for human 4-1BBL, with reference to SEQ ID NO:389, Ser5 and Ser8, with a residue that reduces or eliminates reverse signaling.

[0664] The immunostimulatory bacteria herein also can be engineered to express agonistic antibodies against co-stimulatory molecules (e.g., 4-1BB) to enhance the anti-tumor immune response.

[0665] TNF Receptor Superfamily

[0666] The TNF superfamily of ligands (TNFSF) and their receptors (TNFRSF) are involved in the proliferation, differentiation, activation and survival of tumor and immune effector cells. Members of this family include CD30, Fas-L, TRAIL-R, and TNF-R, which induce apoptosis, and CD27, OX40L, CD40L, GITR-L, and 4-1BBL, which regulate B and T-cell immune responses. Other members include herpesvirus entry mediator (HVEM). The expression of TNFSF and TNFRSF by the immunostimulatory bacteria herein can enhance the anti-tumor immune response. It has been shown, for example, that the expression of 4-1BBL in murine tumors enhances immunogenicity, and that intratumoral injection of dendritic cells (DCs) with increased expression of OX40L can result in tumor rejection in murine models. Studies have also shown that injection of an adenovirus expressing recombinant GITR into B16 melanoma cells promotes T-cell infiltration and reduces tumor volume. Stimulatory antibodies against molecules such as 4-1BB, OX40 and GITR also can be encoded by the immunostimulatory bacteria to stimulate the immune system. For example, agonistic anti-4-1BB monoclonal antibodies have been shown to enhance anti-tumor CTL responses, and agonistic anti-OX40 antibodies have been shown to increase anti-tumor activity in transplantable tumor models. Additionally, agonistic anti-GITR antibodies have been shown to enhance anti-tumor responses and immunity (see, e.g., Lechner et al. (2011) Immunotherapy 3(11):1317-1340; and Peggs et al. (2009) Clinical and Experimental Immunology 157:9-19).

[0667] CD40 and CD40L

[0668] CD40, which is a member of the TNF receptor superfamily, is expressed by APCs and B cells, while its ligand, CD40L (CD154), is expressed by activated T-cells. Interaction between CD40 and CD40L stimulates B cells to produce cytokines, resulting in T-cell activation and tumor cell death. Studies have shown that anti-tumor immune responses are impaired with reduced expression of CD40L on T-cells, or

[0669] CD40 on dendritic cells. CD40 is expressed on the surface of several B-cell tumors, such as follicular lymphoma, Burkitt lymphoma, lymphoblastic leukemia, and chronic lymphocytic leukemia, and its interaction with CD40L has been shown to increase the expression of B7-1/CD80, B7-2/CD86, and human leukocyte antigen (HLA) class II molecules in the CD40⁺ tumor cells, as well as enhance their antigen-presenting abilities. Transgenic expression of CD40L in a murine model of multiple myeloma resulted in the induction of CD4⁺ and CD8⁺ T-cells, local and systemic anti-tumor immune responses, and reduced tumor growth. Anti-CD40 agonistic antibodies also induced anti-tumor T-cell responses (see, e.g., Marin-Acevedo et al. (2018) Journal of Hematology & Oncology 11:39; Dotti et al. (2002) Blood 100(1):200-207; and Murugaiyan et al. (2007) J. Immunol. 178:2047-2055).

[0670] 4-1BB and 4-1BBL

[0671] 4-1BB (CD137) is an inducible co-stimulatory receptor that is expressed primarily by T-cells and NK cells; it binds its ligand 4-1BBL that is expressed on APCs, including DCs, B-cells, and monocytes, to trigger immune cell proliferation and activation. 4-1BB results in longer and more widespread responses of activated T-cells. Anti-4-1BB agonists and 4-1BBL fusion proteins have been shown to increase immune-mediated anti-tumor activity, for example, against sarcoma and mastocytoma tumors, mediated by CD4⁺ Th1 and tumor-specific CTL activity (see, e.g., Lechner et al. (2011) Immunotherapy 3(11):1317-1340; and Marin-Acevedo et al. (2018) Journal of Hematology & Oncology 11:39). 4-1BBL is negatively regulated by its cytoplasmic signaling domain. In the late-phase of 4-1BBL ligation on macrophages to T-cells, reverse signaling of the 4-1BBL cytoplasmic domain induces surface translocation of 4-1BBL to bind to form a signaling complex with TLR4. This induces high levels of TNF-α, comparable to LPS activation of TLR4, that leads to immunosuppression of the adaptive immune response (see, e.g., Ma et al. (2013) Sci. Signaling 295(6):1-11).

[0672] 4-1BBL, a member of the TNF superfamily, is expressed in B-cells, dendritic cells, activated T-cells and macrophages. 4-1BBL binds to its receptor, 4-1BB, and provides a co-stimulatory signal for T-cell activation and expansion. The human 4-1BBL gene encodes a 254 amino acid type II transmembrane protein containing a 28 amino acid cytoplasmic domain, a 21 amino acid transmembrane protein domain, and a 205 amino acid extracellular domain (see, SEQ ID NO:389). Deletion of all or of a portion of the cytoplasmic domain of 4-1BBL (corresponding to amino acid residues 1-28 of SEQ ID NO:342 or 389), as described herein, potentiates the activation of 4-1BBL without the immunosuppressive reverse signaling. The portion that is remaining is sufficient to potentiate the activation of 4-1BBL, but without the immunosuppressive reverse signaling. As described below, the truncated cytoplasmic domain can include amino acids or replacements to ensure proper orientation of the expressed protein in the cell membrane (similar modifications can be effected in others of the membrane-spanning proteins in which the cytoplasmic domain is truncated or deleted). Provided herein are nucleic acid molecules encoding a 4-1BBL variant that lacks the cytoplasmic domain, or that has a truncated cytoplasmic domain, to eliminate the immunosuppressive reverse signaling. An example of such nucleic acid and encoded protein is described in the Examples (see, e.g., SEQ ID NOs: 391 and 395). The receptors also can be cytoplasmically truncated or deleted.

[0673] OX40 and OX40L

[0674] OX40 (CD134) is a member of the TNF receptor superfamily that is expressed on activated effector T-cells, while its ligand, OX40L is expressed on APCs, including DCs, B cells and macrophages, following activation by TLR agonists and CD40-CD40L signaling. OX40-OX40L signaling results in the activation, potentiation, proliferation and survival of T-cells, as well as the modulation of NK cell function and inhibition of the suppressive activity of Tregs. Signaling through OX40 also results in the secretion of cytokines (IL-2, IL-4, IL-5, and IFN-γ), boosting Th1 and Th2 cell responses. The recognition of tumor antigens by tumor-infiltrating lymphocytes (TILs) results in increased expression of OX40 by the TILs, which has been correlated with improved prognosis. Studies have demonstrated that treatment with anti-OX40 agonist antibodies or Fc-OX40L fusion proteins results in enhanced tumor-specific CD4⁺ T-cell responses and increased survival in murine models of melanoma, sarcoma, colon carcinoma, and breast cancer, while Fc-OX40L incorporated into tumor cell vaccines protected mice from subsequent challenge with breast carcinoma cells (see, e.g., Lechner et al. (2011) Immunotherapy 3(11):1317-1340; and Marin-Acevedo et al. (2018) Journal of Hematology & Oncology 11:39).

[0675] B7-CD28 Family

[0676] CD28 is a co-stimulatory molecule expressed on the surface of T-cells that acts as a receptor for B7-1 (CD80) and B7-2 (CD86), which are co-stimulatory molecules expressed on antigen-presenting cells. CD28-B7 signaling is required for T-cell activation and survival, and for the prevention of T-cell anergy, and results in the production of interleukins, such as IL-6.

[0677] Optimal T-cell priming requires two signals: (1) T-cell receptor (TCR) recognition of MHC-presented antigens, and (2) co-stimulatory signals resulting from the ligation of T-cell CD28 with B7-1 (CD80) or B7-2 (CD86) expressed on APCs. Following T-cell activation, CTLA-4 receptors are induced, which then outcompete CD28 for binding to B7-1 and B7-2 ligands. Antigen presentation by tumor cells is poor due to their lack of expression of co-stimulatory molecules, such as B7-1/CD80 and B7-2/CD86, resulting in a failure to activate the T-cell receptor complex. As a result, upregulation of these molecules on the surfaces of tumor cells can enhance their immunogenicity. Immunotherapy of solid tumors and hematologic malignancies has been successfully induced by B7, for example, via tumor cell expression of B7, or soluble B7-immunoglobulin fusion proteins. The viral-mediated tumor expression of B7, in combination with other co-stimulatory ligands, such as ICAM-3 and LFA-3, has been successful in preclinical and clinical trials for the treatment of chronic lymphocytic leukemia and metastatic melanoma. Additionally, soluble B7 fusion proteins have demonstrated promising results in the immunotherapy of solid tumors as single agent immunotherapies (see, e.g., Lechner et al. (2011) Immunotherapy 3(11):1317-1340; and Dotti et al. (2002) Blood 100(1):200-207).

[0678] 2. Molecules that Activate Prodrugs

[0679] The plasmids in the immunostimulatory bacteria provided herein can include nucleic acids that encode molecules, such as enzymes, that activate, such as by cleavage of a portion of, therapeutic products, such as prodrugs, including chemotherapeutic prodrugs, particularly toxins, that are activated by enzymatic cleavage. As a result, the inactive prodrug can be administered systemically, and is inactive. The plasmid-encoded activating molecule, such as an enzyme, is expressed in the tumor microenvironment after delivery of the immunostimulatory bacteria provided herein, so that the inactive prodrug is activated in the tumor microenvironment, where it exerts its anti-tumor effect. There are many examples of such prodrugs, including certain nucleosides, and toxin conjugates. Many such prodrugs and enzymes are known (see, e.g., Malekshah et al., (2016) Curr. Pharmacol. Rep. 2:299-308). These include prodrugs of 5-fluorouracil, oxazaphosphorines, platinum drugs, and enzymes such as deaminases, nitroreductases, phosphorylases, cytochrome P450 enzymes, and many others.

[0680] 3. Constitutively Active Proteins that Stimulate the Immune Response and/or Type I IFN, Non-Human STING Proteins, Chimeras, and Modified Forms

[0681] Type I interferons (IFNs; also referred to as interferon type 1), include IFN-α and IFN-β, and are pleiotropic cytokines with antiviral, anti-tumor, and immunoregulatory activities. IFN-β is produced by most cell types; IFN-α primarily is produced by hematopoietic cells, particularly plasmacytoid dendritic cells. Type I IFNs are produced following the sensing of pathogen-associated molecular patterns (PAMPs) by pattern recognition receptors (PRRs). They are involved in the innate immune response against pathogens, mainly viral, and are potent immunomodulators that promote antigen presentation, mediate dendritic cell (DC) maturation, activate cytotoxic T lymphocytes (CTLs), natural killer (NK) cells and macrophages, and activate the adaptive immune system by promoting the development of high-affinity antigen-specific T-cell and B-cell responses and immunological memory.

[0682] Type I IFNs exhibit anti-proliferative and pro-apoptotic effects on tumors and have anti-angiogenic effects on tumor neovasculature. They induce the expression of MHC class I molecules on tumor cell surfaces, increase the immunogenicity of tumor cells, and activate cytotoxicity against them. Type I IFN has been used as a therapeutic for the treatment of cancers and viral infections. For example, IFN-α (sold under the trademark Intron®/Roferon®-A) is approved for the treatment of hairy cell leukemia, malignant melanoma, AIDS-related Kaposi's sarcoma, and follicular non-Hodgkin's lymphoma; it also is used in the treatment of chronic myelogenous leukemia (CML), renal cell carcinoma, neuroendocrine tumors, multiple myeloma, non-follicular non-Hodgkin's lymphoma, desmoid tumors, and cutaneous T-cell lymphoma, although use is limited due to systemic immunotoxicity (see, e.g., Ivashkiv and Donlin (2014) Nat. Rev. Immunol. 14(1):36-49; Kalliolias and Ivashkiv (2010) Arthritis Research & Therapy 12(Suppl 1):S1; and Lee, S. and Margolin, K. (2011) Cancers 3:3856-3893).

[0683] Expression of type I interferons in tumors and the tumor microenvironment is among the immune responses that the immunostimulatory bacteria herein are designed to evoke. Inducing or evoking type I interferon provides anti-tumor immunity for the treatment of cancer.

[0684] a. Constitutive STING Expression and Gain-of-Function Mutations

[0685] The induction of type I IFNs, proinflammatory cytokines and chemokines is necessary for mounting an immune response that prevents or inhibits infection by viral pathogens. This response also can be effective as an anti-tumor agent. The immunostimulatory bacteria provided herein encode proteins that constitutively induce type I IFNs. Among these proteins are those that occur in individuals with various diseases or disorders that involve the over-production of immune response modulators. For example, over-production or excessive production, or defective negative regulation of type I IFNs and pro-inflammatory cytokines, can lead to undesirable effects, such as inflammatory and autoimmune diseases. Disorders involving the overproduction, generally chronic, of type I IFNs, are referred to as interferonopathies (see, e.g., Lu and MacDougall (2017) Front. Genet. 8:118; and Konno et al. (2018) Cell Reports 23:1112-1123). Disorders and clinical phenotypes associated with type I interferonopathies include Aicardi-Goutiéres syndrome (AGS), STING-associated vasculopathy with onset in infancy (SAVI), Singleton-Merten syndrome (SMS), atypical SMS, familial chilblain lupus (FCL), systemic lupus erythematosus (SLE), bilateral striatal necrosis (BSN), cerebrovascular disease (CVD), dyschromatosis symmetrica hereditaria (DSH), spastic paraparesis (SP), X-linked reticulate pigmentary disorder (XLPDR), proteasome-associated auto-inflammatory syndrome (PRAAS), intracranial calcification (ICC), Mendelian susceptibility to mycobacterial disease (MSMD), and spondyloenchondrodysplasia (SPENCD) (see, e.g., Rodero et al. (2016) J. Exp. Med. 213(12):2527-2538). These phenotypes are associated with particular genotypes, involving mutations in genes that lead to constitutive activities of products involved in the induction of type I IFNs.

[0686] The sustained activation of interferon signaling can be due to: 1) loss-of-function mutations leading to increased cytosolic DNA (e.g., mutations in TREX1 and SAMHD1), or increased cytosolic RNA/DNA hybrids (e.g., mutations in RNASEH2A, RNASEH2B, RNASEH2C, and POLA1); 2) loss-of-function mutations resulting in a defect in RNA editing and abnormal sensing of self-nucleic acid RNA species in the cytosol (e.g., mutations in ADAR1); 3) gain-of-function mutations leading to constitutive activation of cytosolic IFN signaling pathways/increased sensitivity to cytosolic nucleic acid ligands (e.g., mutations in RIG-I, MDA5 and STING); 4) loss-of-function mutations leading to aberrant RNA signaling via MAVS caused by a disturbance of the unfolded protein response (e.g., mutations in SKIV2L); 5) loss-of-function mutations in molecules responsible for limiting IFN receptor (IFNAR1/2) signaling, leading to uncontrolled IFN-stimulated gene (ISG) production (e.g., mutations in USP18 and ISG15); 6) proteasomal dysfunction, leading to increased IFN signaling through an unknown mechanism (e.g., mutations in PSMA3, PSMB4 and PSMB8); and 7) loss-of-function mutations in TRAP/ACP5 and C1q, where the mechanisms leading to type I IFN signaling remain unclear (see, e.g., Rodero et al. (2016) J. Exp. Med. 213(12):2527-2538).

[0687] Of interest herein are mutations that lead to gain-of-function (GOF). There are known mutations in STING, MDA5 and RIG-I, that are associated with constitutive activation of the encoded proteins, and/or enhanced sensitivity or increased affinity or binding to endogenous ligands. GOF mutations in STING, for example, are linked to SAVI and FCL; GOF mutations in MDA5 are linked to AGS and SMS; and GOF mutations in RIG-I are linked to atypical SMS.

[0688] TMEM173 STING Alleles

[0689] Stimulator of interferon genes (STING) is encoded by the transmembrane protein 173 (TMEM173) gene, which is a ˜7 kb-long gene. The human TMEM173 gene is characterized by significant heterogeneity and population stratification of alleles. The most common human TMEM173 allele is referred to as R232 (referencing the amino acid present at residue 232; see, e.g., SEQ ID NOs:305-309, setting forth the sequences of various human TMEM173 alleles). More than half the American population is not R232/R232. The second most common allele is R71H-G230A-R293Q (HAQ). Other common alleles include AQ (G230A-R293Q), Q (Q293) and R232H (named REF after the reference STING allele first identified and catalogued in the database by Glen Barber).

[0690] R232/R232 is the most common genotype in Europeans, while HAQ/R232 is the most common genotype in East Asians. Africans have no HAQ/HAQ genotypes, but have the Q allele, and ˜4% of Africans are AQ/AQ, which is absent in other ethnic populations (see, e.g., Patel and Jin (2018) Genes & Immunity, doi:10.1038/s41435-018-0029-9). The REF, AQ and Q alleles are highly refractory to bacterially-derived CDNs, such as 3′3′ c-di-GMP (see, e.g., Corrales et al. (2015) Cell Reports 11:1018-1030).

[0691] STING Gain-of-Function Mutations

[0692] Several activating or gain-of-function (GOF) mutations in TMEM173, the gene for STING, inherited and de novo, have been linked to the rare auto-inflammatory disease SAVI (STING-associated vasculopathy with onset in infancy). SAVI is an autosomal dominant disease and is characterized by systemic inflammation, interstitial lung disease, cutaneous vasculitis, and recurrent bacterial infection. SAVI with de novo TMEM173 mutations typically is characterized by an early-onset (<8 weeks) and severe phenotype, while familial mutations result in late-onset (teens to adults) and milder clinical symptoms. Inherited TMEM173 activating mutations include G166E and V155M, whereas de novo mutations include N154S, V155M, V147M, V147L, C206Y, R284G, R281Q, and S102P/F279L (see, e.g., Patel and Jin (2019) Genes & Immunity 20:82-89). Other activating TMEM173 mutations that have been identified include R284M, R284K, R284T, E316Q, and R375A (see, e.g., U.S. Patent Publication No. 2018/0311343). Another gain-of-function mutation in TMEM173 is R284S, which results in a highly constitutively active STING, and was found to trigger innate immune signaling in the absence of activating CDNs, leading to chronic production of pro-inflammatory cytokines (see, e.g., Konno et al. (2018) Cell Reports 23:1112-1123).

[0693] TMEM173 mutations, such as N154S, V155M and V147L, and/or any of the mutations listed in the table below, singly or in any combination with these and any other such mutations, such as N154S/R284G, result in a gain-of-function STING that is constitutively active and does not require, or is hypersensitive to, ligand stimulation, leading to chronic activation of the STING-interferon pathway. This has been demonstrated (see, e.g., Liu et al. (2014) N. Engl. J. Med. 371:507-518). Constructs of mutated TMEM173 (with each of the replacements V147L, N154S, V155M, and the loss-of-function mutant V155R), and non-mutated TMEM173, were transfected into STING-negative HEK293T cells, and stimulated with the STING ligand, cGAMP. Cells transfected with the N154S, V155M and V147L mutants exhibited highly elevated IFNB1 (the gene encoding IFN-β) reporter activity, which was not significantly boosted by stimulation with the STING ligand cGAMP. Cells that were transfected with the loss-of-function mutant (V155R), non-mutated TMEM173, or control plasmid, had no significant baseline activation. Stimulation with cGAMP resulted in a response in a dose-dependent manner in cells with non-mutated TMEM173, and resulted in a minimal response only at the highest cGAMP concentration, in cells expressing the loss-of-function mutant (see, e.g., Liu et al. (2014) N. Engl. J. Med. 371:507-518). These results show that the activating TMEM173 mutations result in constitutive activation of STING, even in the absence of stimulation by cGAMP.

[0694] G207E is another gain-of-function STING mutation that causes alopecia, photosensitivity, thyroid dysfunction, and SAVI-features. The G207E mutation causes constitutive activation of inflammation-related pathways in HEK cells, as well as aberrant interferon signature and inflammasome activation in patient peripheral blood mononuclear cells (PBMCs). Using STING variants with the R232 or H232 allele and the GOF mutation G207E, it was shown that after stimulation with CDN, the R232+G207E variant resulted in slight increases of activity in the IFN-β and STAT1/2 pathways, while with the H232+G207E variant, IFN-β levels remained constant, and STAT1/2 showed diminished activity. Both variants showed similar STAT3 and NF-κB pathway activation following stimulation. These results show that the residue R at position 232 is important for cGAMP binding and IFN induction, and show that G207E mutants result in constitutive activation of STING signaling pathways and ligand-dependent hyperactivation of the NF-κB pathway. Patients with the R232 allele and the G207E mutation had more severe disease; this polymorphism strengthens the constitutive activation of the mutant STING, leading to the overexpression of downstream targets, such as IFN, IL1-β, and IL-18 (see, e.g., Keskitalo et al. (2018), available from: doi.org/10.1101/394353).

[0695] 67 amino acids in murine STING (SEQ ID NO:369) were mutated (see, Burdette et al. (2011) Nature 478(7370):515-518) either individually or in groups, to identify amino acids involved in cyclic di-GMP (c-di-GMP) binding and/or IFN induction. Among the mutants identified were hyperactive mutants R196A/D204A, S271A/Q272A, R309A/E315A, E315A, E315N, E315Q, and S271A (corresponding to R197A/D205A, S272A/Q273A, R310A/E316A, E316A, E316N, E316Q, and S272A, respectively, with reference to the sequence of human STING as set forth in SEQ ID NOs:305-309), that spontaneously induced IFN at low levels of transfection and did not respond to c-di-GMP, and the mutants R374A, R292A/T293A/E295A/E299A, D230A, R231A, K235A, Q272A, S357A/E359A/S365A, D230A/R231A/K235A/R237A, and R237A (corresponding to R375A, R293A/T294A/E296A (there is no equivalent to E299 in human STING), D231A, R232A, K236A, Q273A, S358A/E360A/S366A, D231A/R232A/K236A/R238A, and R238A, respectively, with reference to human STING, as set forth in SEQ ID NOs:305-309), that induced IFN when overexpressed but did not respond to c-di-GMP. These alleles can still respond to the endogenous CDN 2′3′ c-di-GAMP, as it was later discovered that some human STING mutations have low affinity for the 3′3′ CDNs produced by bacteria, such as c-di-GMP (see, e.g., Corrales et al. (2015) Cell Reports 11:1018-1030).

[0696] The immunostimulatory bacteria provided herein that encode these proteins with gain-of-function mutations exploit the constitutive activation of these proteins to increase production of type I IFNs and pro-inflammatory cytokines. Tumor-targeting immunostimulatory bacteria are provided herein that encode STING, IRF3, IRF5, IRF7, MDA5, and/or RIG-I, with gain-of-function mutations. The immunostimulatory bacteria increase the production of type I IFN-mediated cytokines and chemokines in the tumor microenvironment, potentiating the anti-tumor immune response and improving the therapeutic efficacy of the immunostimulatory bacteria. The gene encoding STING is referred to as TMEM173, the gene encoding MDA5 is IFIH1, and the gene encoding RIG-I is DDX58. There are numerous alleles for each gene, and known mutations that can occur in genes with any of the alleles, resulting in gain-of-function or constitutive activation. The mutations listed below can occur singly, or can be used in any combination. Other mutations that result in gain-of-function can be identified by routine screening/mutation protocols. The table below lists exemplary gain-of-function mutations in each of STING/TMEM173 (SEQ ID NOs:305-309), MDA5/IFIH1 (SEQ ID NO:310), RIG-I/DDX58 (SEQ ID NO:311), IRF3 (SEQ ID NO:312), and IRF7 (SEQ ID NO:313). Other mutations, such as deletion of, or replacement of, a phosphorylation site or sites, such as S324/L325/S326→S324A/L325/S326A in STING, and other replacements to eliminate a phosphorylation site to reduce nuclear factor-κB (NF-κB) signaling in STING, or other proteins that employ such signaling, also can be introduced.

[0697] The resulting proteins can be encoded in the immunostimulatory bacteria provided herein. The proteins are encoded on plasmids in the immunostimulatory bacteria.

[0698] Administering nucleic acids encoding wild-type STING can induce an immune response; the administration of gain-of-function STING mutants, with constitutive activity as provided herein, in tumor-targeted immunostimulatory bacteria, leads to a more potent immune response and more effective anti-cancer therapeutic. The enhanced immune response by the tumor-targeted administration of constitutively active STING, or other such modified DNA/RNA sensors, such as gain-of-function mutants of MDA5, RIG-I, IRF3, or IRF7, as provided herein, provides a therapeutically more effective anti-cancer treatment. For example, as described herein, modifying the immunostimulatory bacteria so that they do not infect epithelial cells, but retain the ability to infect phagocytic cells, including tumor-resident immune cells, effectively targets the immunostimulatory bacteria to the tumor microenvironment, improving therapeutic efficiency and preventing undesirable systemic immune responses. These tumor-targeted bacteria are engineered to encode gain-of-function STING, MDA5, RIG-I, IRF3, or IRF7 mutants, which are constitutively active, for example, even in the absence of ligand stimulation, providing a potent type I IFN response to improve the anti-cancer immune response in the tumor microenvironment.

[0699] Thus, for example, the administration of constitutively activated STING can provide an alternative means to boost STING signaling for the immunotherapeutic treatment of cancer. In certain embodiments, the tumor-targeting immunostimulatory bacteria provided herein can be modified to encode STING/TMEM173 (SEQ ID NOs: 305-309) with gain-of-function mutations, selected from S102P, V147L, V147M, N154S, V155M, G166E, R197A, D205A, R197A/D205A, C206Y, G207E, D231A, R232A, K236A, R238A, D231A/R232A/K236A/R238A, S272A, Q273A, S272A/Q273A, F279L, S102P/F279L, R281Q, R284G, R284S, R284M, R284K, R284T, R293A, T294A, E296A, R293A/T294A/E296A, R310A, E316A, E316N, E316Q, R310A/E316A, S324A/S326A, S358A, E360A, S366A, S358A/E360A/S366A, N154S/R284G, and R375A, as well as conservative mutations thereof. In addition, combinations of STING gain-of-function mutations can have significantly boosted STING signaling over their individual mutation counterparts.

Table of Exemplary Gain-Of-Function Mutants
Gain-of-Function Mutations Resulting in the Persistent Expression of Type I IFN

| STING | RIG-I | MDA5 | IRF3 | IRF7 |
|---|---|---|---|---|
| V147L | E373A | T331I | S396D | S477D/S479D |
| N154S | C268F | T331R | S396D/S398D | S475D/S476D/S477D/ |
| | | | | S479D/S483D/S487D |
| V155M | | A489T | S396D/S398D/ | Δ247-467 |
| | | | S402D/T404D/ | |
| | | | S405D | |
| G166E | | R822Q | | S475D/S477D/S479D |
| C206Y | | G821S | | |
| G207E | | A452T | | |
| R281Q | | A946T | | |
| R284G | | R337G | | |
| R284S | | D393V | | |
| R284M | | G495R | | |
| R284K | | R720Q | | |
| R284T | | R779H | | |
| S102P/F279L | | R779C | | |
| S102P | | L372F | | |
| F279L | | | | |
| R197A | | | | |
| D205A | | | | |
| R197A/D205A | | | | |
| S272A/Q273A | | | | |
| R310A/E316A | | | | |
| R310A | | | | |
| E316A | | | | |
| E316N | | | | |
| E316Q | | | | |
| S272A | | | | |
| R375A | | | | |
| R293A | | | | |
| T294A | | | | |
| E296A | | | | |
| R293A/T294A/E296A | | | | |
| D231A | | | | |
| R232A | | | | |
| K236A | | | | |
| Q273A | | | | |
| S358A | | | | |
| E360A | | | | |
| S366A | | | | |
| S358A/E360A/S366A | | | | |
| D231A/R232A/K236A/R238A | | | | |
| R238A | | | | |
| V147M | | | | |
| S324A/S326A | | | | |
| N154S/R284G | | | | |

Amino acid residues R197, D205, R310, R293, T294, E296, S272, Q273, E316, D231, R232, K236, S358, E360, S366, and R238, with reference to the sequence of human STING, as set forth in any of SEQ ID NOs:305-309, correspond to amino acid residues R196, D204, R309, R292, T293, E295, S271, Q272, E315, D230, R231, K235, S357, E359, S365, and R237, respectively, with reference to the sequence of murine STING, as set forth in SEQ ID NO:369.

[0700] It is shown herein that the combination of replacements N154S/R284G results in constitutive expression of type I interferon. Also included are conservative substitutions of each of the replacements (see, Table in the Definitions section, listing exemplary conservative mutations for each amino acid).

[0701] b. Constitutive IRF3 Expression and Gain-of-Function Mutations

[0702] IRF3 (interferon regulatory factor 3, or IRF-3) and IRF7 (or IRF-7) are key activators of type I IFN genes. Following virus-induced C-terminal phosphorylation (by TBK1), activated IRF3 and IRF7 form homodimers, translocate from the cytoplasm to the nucleus, and bind to IFN-stimulated response elements (ISREs) to induce type I IFN responses. IRF3 is expressed constitutively in unstimulated cells, and exists as an inactive cytoplasmic form, while IRF7 is not constitutively expressed in cells, and is induced by IFN, lipopolysaccharide, and virus infection. Overexpression of IRF3 significantly increases the virus-mediated expression of type I IFN genes, resulting in the induction of an antiviral state. IRF3 activation also has been shown to up-regulate the transcription of the CC-chemokine RANTES (CCL5) following viral infection (see, e.g., Lin et al. (1999) Mol. Cell Biol. 19(42465-2474).

[0703] Residues S385, S386, S396, S398, S402, T404, and S405 in the C-terminal domain of IRF3 are phosphorylated after virus infection, inducing a conformational change that results in the activation of IRF3. IRF3 activation is induced, not only by viral infection, but also by lipopolysaccharide (LPS) and poly(I:C). Of the seven residues that can be phosphorylated in the C-terminal cluster of IRF3, a single point mutation, S396D, is sufficient for the generation of a constitutively active form of IRF3. IRF3(S396D) enhances the transactivation of IFNα1, IFN-β, and RANTES promoters by 13-, 14-, and 11-fold, respectively, compared to wild-type IRF3. Another mutant, IRF3(S396D/S398D), enhances the transactivation of IFNα1, IFN-β, and RANTES promoters by 13-, 12-, and 12-fold, respectively, compared to wild-type IRF3. Another constitutively active mutant of IRF3 is IRF3(5D), in which the serine or threonine residues at positions 396, 398, 402, 404, and 405 are replaced by phosphomimetic aspartic acid residues (IRF3(S396D/S398D/S402D/T404D/S405D)). Similar gain-of-function mutations, leading to constitutive activity of immune response mediators, such as induction of type I interferon, can be achieved by mutating serine residues to phosphomimetic aspartic acid in other proteins, such as RIG-I, MDA5, and STING, that are in immune response signaling pathways.

[0704] IRF3(5D) displays constitutive DNA binding and transactivation activities, dimer formation, association with the transcription coactivators p300 (also called EP300, or E1A binding protein p300)/CBP (also known as CREB-binding protein, or CREBBP), and nuclear localization. Its transactivation activity is not induced further by virus infection. IRF3(5D) is a very strong activator of IFN-β and ISG-15 gene expression; IRF3(5D) alone stimulates IFN-β expression as strongly as virus infection, and enhances transactivation of IFNα1, IFN-β, and RANTES promoters by 9-fold, 5.5-fold, and 8-fold, respectively, compared to wild-type IRF3 (see, e.g., Lin et al. (2000) J. Biol. Chem. 275(44):34320-34327; Lin et al. (1998) Mol. Cell Biol. 18(5):2986-2996; and Servant et al. (2003) J. Biol. Chem. 278(11):9441-9447). Any of positions S385, S386, S396, S398, S402, T404, and S405 can be mutated, alone or in combination, to produce constitutively active IRF3 mutants in the immunostimulatory bacteria provided herein.

[0705] c. Non-Human STING Proteins, and Variants Thereof with Increased or Constitutive Activity, and STING Chimeras, and Variants Thereof with Increased or Constitutive Activity

[0706] As discussed above, cytosolic double-stranded DNA (dsDNA) stimulates the production of type I interferon (IFN) through the endoplasmic reticulum (ER)-resident adaptor protein STING (stimulator of IFN genes), which activates the transcription factor interferon regulatory factor 3 (IRF3). The TANK binding kinase 1 (TBK1)/IRF3 axis results in the induction of type I IFNs, and the activation of dendritic cells (DCs) and cross-presentation of tumor antigens to activate CD8⁺ T cell-mediated anti-tumor immunity. STING signaling also activates the nuclear factor kappa-light-chain-enhancer of activated B cell (NF-κB) signaling axis, resulting in a pro-inflammatory response, but not in the activation of the DCs and CD8⁺ T-cells that are required for anti-tumor immunity.

[0707] Upon recognition of 2′3′ cGAMP, STING translocates from the endoplasmic reticulum through the Golgi apparatus, allowing the recruitment of TANK-binding kinase 1 (TBK1), and the activation of the transcription factors IRF3 and NF-κB. The carboxyl-terminal tail (C-terminal tail or CTT) region of STING is necessary and sufficient to activate TBK1 and stimulate the phosphorylation of IRF3; it also is involved in NF-κB signaling. The CTT is an unstructured stretch of approximately 40 amino acids that contains sequence motifs required for STING phosphorylation and recruitment of IRF3. IRF3 and NF-κB downstream signaling is attributed to specific sequence motifs within the C-terminal tail (CTT) of STING that are conserved among vertebrate species. Modular motifs in the CTT, which include IRF3-, TBK1- and TRAF6-binding modules, control the strength and specificity of cell signaling and immune responses.

[0708] Depending on the species and the respective characteristics of their STING CTT discrete elements, the IRF3 and NF-κB downstream responses can be affected, and sometimes opposite. The STING CTT elements dictate and finely tune the balance between the two signaling pathways, resulting in different biological responses. In human and mouse immune cells, for example, STING-dependent IRF3 activation results predominantly in a type I interferon response. STING signaling in human cells also drives a pro-inflammatory response through canonical and possibly non-canonical NF-κB pathways via TRAF6 recruitment. Human STING residue 5366 (see, e.g., SEQ ID NOs:305-309) is a primary TBK1 phosphorylation site that is part of an LxIS motif in the CTT, which is required for IRF3 binding, while a second PxPLR motif, including residue L374, is required for TBK1 binding. The LxIS and PxPLR motifs are highly conserved in all vertebrate STING alleles. In other species, STING signaling results predominantly in the activation of the NF-κB signaling axis. For example, the zebrafish CTT, which is responsible for hyperactivation of NF-κB signaling, contains an extension with a highly conserved PxExxD motif at the extreme C-terminus that is not present in human and other mammalian STING alleles; this motif shares similarity with tumor necrosis factor receptor-associated factor 6 (TRAF6) binding sites. While the role of TRAF6 in human STING signaling is non-essential, TRAF6 recruitment is essential for zebrafish STING-induced NF-κB activation. A human-zebrafish STING chimera, in which human STING was engineered to contain the zebrafish STING CTT module DPVETTDY, induced more than 100-fold activation of NF-κB activation, indicating that this region is necessary and sufficient to direct enhanced NF-κB signal activation. The addition of the zebrafish CTT also resulted in an increased STING interferon response (see, de Oliveira Mann et al. (2019) Cell Reports 27:1165-1175).

[0709] The differences among species in the balance between IRF3 and NF-κB signaling is exploited herein to produce modified STING proteins that have reduced NF-κB signaling, and/or optionally, increased IRF3 signaling, so that when the STING protein is delivered to and expressed in the TME, the resulting response is an increased anti-tumor/anti-viral response, compared to the unmodified STING protein.

[0710] In some embodiments, STING proteins from species that have low or no NF-κB signaling activity are provided in delivery vehicles, including any of the immunostimulatory bacteria described herein or known to those of skill in the art, as well as in other delivery vehicles, such as viral vectors, including oncolytic vectors, minicells, exosomes, liposomes, and in cells, such as T-cells that are used in cell therapy and used to deliver vehicles, such as bacteria and oncolytic vectors.

[0711] The non-human STING proteins can be, but are not limited to, STING proteins from the following species: Tasmanian devil (Sarcophilus harrisii; SEQ ID NO:349), marmoset (Callithrix jacchus; SEQ ID NO:359), cattle (Bos taurus; SEQ ID NO:360), cat (Felis catus; SEQ ID NO:356), ostrich (Struthio camelus australis; SEQ ID NO:361), crested ibis (Nipponia nippon; SEQ ID NO:362), coelacanth (Latimeria chalumnae; SEQ ID NOs:363-364), boar (Sus scrofa; SEQ ID NO:365), bat (Rousettus aegyptiacus; SEQ ID NO:366), manatee (Trichechus manatus latirostris; SEQ ID NO:367), ghost shark (Callorhinchus milli; SEQ ID NO:368), and mouse (Mus musculus; SEQ ID NO:369). These vertebrate STING proteins readily activate immune signaling in human cells, indicating that the molecular mechanism of STING signaling is shared in vertebrates (see, de Oliveira Mann et al. (2019) Cell Reports 27:1165-1175).

[0712] In other embodiments, the non-human STING proteins contain any of the constitutive STING activation and gain-of-function mutations, at corresponding loci in the non-human STING corresponding to those in human STING, described above (see, Example 17 below, which provides exemplary alignments and corresponding mutations in various species; see, also, FIGS. 1-13).

[0713] In other embodiments, chimeras of STING proteins are provided. In the chimeras, the CTT region, or portion(s) thereof that confers or participates in NF-κB signaling/activity, of a first species STING protein, is replaced with the corresponding CTT or portion(s) thereof from a second species, whose STING protein has lower or very little, less than human, NF-κB signaling activity. Generally, the first species is human, and the replacing CTT or portion(s) thereof is from the STING of a species such as Tasmanian devil, marmoset, cattle, cat, ostrich, boar, bat, manatee, crested ibis, coelacanth, and ghost shark, which have much lower NF-κB activity. This thereby results in a STING protein that induces type I interferon, which is important for anti-tumor activity, and that has limited or no NF-κB activity, which is not desirable in an anti-tumor therapy. The chimeras can further include the human constitutive STING activation and gain-of-function mutations in corresponding loci, to increase or render type I interferon activity constitutive. In all embodiments, the TRAF6 binding motif can be deleted to further decrease or eliminate activity that is not desirable in an anti-tumor therapeutic.

[0714] These non-human STING proteins, chimeras, and mutants are provided in delivery vehicles, such as any described herein or known to those of skill in the art, including oncolytic viral vectors, cells, such as stem cells and T-cells that are used in cell therapies, exosomes, minicells, liposomes, and the immunostimulatory bacteria provided herein, which accumulate in tumor-resident immune cells, and deliver encoded proteins to the tumor microenvironment and to tumors. The non-human STING proteins, modified STING proteins, and STING chimeras, are for use as therapeutics for the treatment of tumors as described herein, or for use in other methods known to those of skill in the art. Pharmaceutical compositions containing the STING proteins, delivery vehicles, and encoding nucleic acids also are provided.

[0715] d. Other Gene Products that Act as Cytosolic DNA/RNA Sensors and Constitutive Variants Thereof

[0716] Other gene products that sense or interact with cytosolic nucleic acids are the retinoic acid-inducible gene I (RIG-I)-like receptors (RLRs), which include RIG-I and MDA5 (melanoma differentiation-associated protein 5). RLRs are cytoplasmic sensors of viral dsRNA and nucleic acids secreted by bacteria, and include RIG-I, MDA5, and LGP2 (laboratory of genetics and physiology 2). Upon the binding of a ligand, such as a viral dsRNA, RIG-I and MDA5 activate the mitochondrial antiviral-signaling adaptor protein, or MAVS, which recruits tumor necrosis factor (TNF) receptor-associated factors (TRAFs), to assemble a signaling complex at the outer membranes of the mitochondria. Downstream signaling components further are recruited by TRAFs, resulting in the phosphorylation and activation of IRF3 (interferon regulatory factor 3), IRF7, NF-κB (nuclear factor kappa-light-chain-enhancer of activated B cells), and AP-1 (activator protein 1). As a result, the expression of IFNs, proinflammatory cytokines, and other genes involved in pathogen clearance, is induced (see, e.g., Lu and MacDougall (2017) Front. Genet. 8:118). Like STING, the constitutive activation of MDA5 and RIG-I due to gain-of-function mutations leads to the induction of type I IFNs, which can be leveraged to enhance the anti-tumor immune response in the immunostimulatory bacteria.

[0717] i. RIG-I

[0718] Retinoic acid-inducible gene I (RIG-I), also known as DDX58 (DEXD/H-box helicase 58), is another protein whose constitutive activation has been linked to the development of interferonopathies, such as atypical Smith-Magenis syndrome. RIG-I, like MDA5/IFIH1, is a member of the RIG-I-like receptor (RLR) family, and is a 925-residue cytosolic pattern recognition receptor that functions in the detection of viral dsRNA. RIG-I initiates an innate immune response to viral RNA through independent pathways that promote the expression of type I and type III IFNs and proinflammatory cytokines (see, e.g., Jang et al. (2015) Am. J. Hum. Genet. 96:266-274; and Lu and MacDougall (2017) Front. Genet. 8:118).

[0719] Atypical Smith-Magenis syndrome, without hallmark dental anomalies, but with variable phenotypes, including glaucoma, aortic calcification, and skeletal abnormalities, has been found to be caused by mutations in the DEXD/H-box helicase 58 gene (DDX58), which encodes retinoic acid-inducible gene I (RIG-I). In particular, the mutations E373A and C268F in DDX58 were identified as causing gain-of-function in RIG-I. Elevated amounts of mutated DDX58 were associated with a significant increase in the basal levels of NF-κB reporter gene activity, and this activity was further increased by stimulation with the dsRNA analog poly(I:C). The RIG-I mutations also induced IRF3 phosphorylation and dimerization at the basal level, and led to increased expression of IFNB1, interferon-stimulated gene 15 (ISG15), and chemokine (C-C motif) ligand 5 (CCL5) in both basal, and poly(I:C) transfected HEK293FT cells. These results indicate that the mutated DDX58/RIG-I results in constitutive activation, leading to increased IFN activity and IFN-stimulated gene expression (see, e.g., Jang et al. (2015) Am. J. Hum. Genet. 96:266-274; and Lu and MacDougall (2017) Front. Genet. 8:118). Tumor-targeting immunostimulatory bacteria provided herein can be modified to encode RIG-I/DDX58 (see, e.g., SEQ ID NO:311) with gain-of-function mutations such as, but not limited to, E373A and C268F, singly, and in combination.

[0720] ii. MDA5/IFIH1

[0721] Another interferonopathy gene is the IFN-induced with helicase C domain-containing protein 1 (IFIH1), also known as melanoma differentiation-associated protein 5 (MDA5), which is a member of the RIG-I-like family of cytoplasmic DExD/H box RNA receptors. MDA5, encoded by IFIH1, is a 1,025 amino acid cytoplasmic pattern-recognition receptor that senses viral double-stranded RNA (dsRNA) and secreted bacterial nucleic acids in the cytoplasm, and activates type I IFN signaling through an adaptor molecule, MAVS (mitochondrial antiviral-signaling protein). MAVS recruits tumor necrosis factor (TNF) receptor-associated factors (TRAFs), which in turn recruit downstream signaling components, resulting in the phosphorylation and activation of IRF3 (interferon regulatory factor 3), IRF7, NF-κB (nuclear factor kappa-light-chain-enhancer of activated B cells), and AP-1 (activator protein 1). This results in the expression of IFNs, proinflammatory cytokines, and other genes involved in pathogen clearance (see, e.g., Rutsch et al. (2015) Am. J. Hum. Genet. 96:275-282; Rice et al. (2014) Nat. Genet. 46(5):503-509; and Lu and MacDougall (2017) Front. Genet. 8:118).

[0722] Gain-of-function (GOF) IFIH1 variants occur in subjects with autoimmune disorders, including Aicardi-Goutiéres syndrome (AGS) and Singleton-Merten syndrome (SMS), which are characterized by prominent vascular inflammation. AGS is an inflammatory disease particularly affecting the brain and skin, and is characterized by an upregulation of interferon-induced transcripts. AGS typically occurs due to mutations in any of the genes encoding DNA exonuclease TREX1, the three non-allelic components of the RNase H2 endonuclease complex, the deoxynucleoside triphosphate triphosphohydrolase SAMHD1, and the double-stranded RNA editing enzyme ADAR1. Some patients with AGS do not have mutations in any of these genes, but have GOF mutations in IFIH1, indicating that this gene also is implicated in AGS. Singleton-Merten syndrome is an autosomal-dominant disorder characterized by abnormalities in the blood vessels (e.g., calcification), teeth (e.g., early-onset periodontitis, root resorption), and bones (e.g., osteopenia, acro-osteolysis, osteoporosis). Interferon signature genes are upregulated in Singleton-Merten syndrome patients, which was linked to GOF mutations in IFIH1 (see, e.g., Rice et al. (2014) Nat. Genet. 46(5):503-509; and Rutsch et al. (2015) Am. J. Hum. Genet. 96:275-282).

[0723] The IFN-β reporter stimulatory activity of wild-type IFIH1, and six IFIH1 GOF mutants identified in AGS patients (R720Q, R779H, R337G, R779C, G495R, D393V), was compared in HEK293T cells, which express low levels of endogenous viral RNA receptors. Wild-type IFIH1 was induced upon binding of the long (>1 kb) dsRNA analog polyinosinic-polycytidylic acid (poly(I:C)), but not by a short 162 bp dsRNA, and had minimal activity in the absence of exogenous RNA. The IFIH1 mutants displayed a significant induction of IFN signaling in response to the short 162 bp dsRNA, in addition to robust signaling in response to poly(I:C). The mutants also displayed a 4-10 fold higher level of baseline signaling activity in the absence of exogenous ligand (see, e.g., Rice et al. (2014) Nat. Genet. 46(5):503-509).

[0724] Another gain-of-function IFIH1 mutation, R822Q, was identified as causing Singleton-Merten syndrome by triggering type I IFN production, and leading to early arterial calcification, as well as dental inflammation and resorption. HEK293T cells (which have the lowest endogenous IFIH1 expression levels) were used to overexpress wild-type and R822Q MDA5. Wild-type IFIH1 expression led to an increase in the expression of IFNB1 (interferon, beta 1, fibroblast) in a dose-dependent manner, whereas the mutated IFIH1 led to approximately 20-fold more IFNB1 expression. Following stimulation with the dsRNA analog poly(I:C), R822Q IFIH1 resulted in higher levels of IFNB1 expression than wild-type IFIH1, indicating that R822Q IFIH1 is hyperactive to non-self dsRNA. There was also higher expression of interferon signature genes, such as IFI27, IFI44L, IFIT1, ISG15, RSG15, RSAD2, and SIGLEC1, in whole-blood samples from Singleton-Merten syndrome patients, which was in agreement with the higher expression level of IFNB1 by R822Q IFIH1 (see, e.g., Rutsch et al. (2015) Am. J. Hum. Genet. 96:275-282).

[0725] The interferon signature observed in patients with another IFIH1 GOF mutation, A489T, is indicative of a type I interferonopathy; IFIH1 A489T is associated with increased interferon production and phenotypes resembling chilblain lupus, AGS, and SMS (see, e.g., Bursztejn et al. (2015) Br. J. Dermatol. 173(6):1505-1513). The A489T variant not only resulted in IFN induction following stimulation with the long dsRNA analog poly(I:C), but also with short dsRNA. Two additional gain-of-function mutations in IFIH1, T331I and T331R, were identified in patients with SMS phenotypes, who presented with a significant upregulation of IFN-induced transcripts. The T331I and T331R variants resulted in increased expression of IFN-β, even in the absence of exogenous dsRNA ligand, consistent with the observed constitutive activation of MDA5 (see, e.g., Lu and MacDougall (2017) Front. Genet. 8:118).

[0726] A946T is another IFIH1 GOF mutation that leads to the increased production of type I IFN, promoting inflammation and increasing the risk of autoimmunity. The A946T mutation in IFIH1 results in additive effects when combined with the TMEM173 R232 allele and the G207E GOF mutation in STING, leading to a severe early-onset phenotype with features similar to SAVI (see, e.g., Keskitalo et al. (2018) preprint, available from doi.org/10.1101/394353). G821S is a GOF mutation in IFIH1 which has been shown to lead to spontaneously developed lupus-like autoimmune symptoms in a mouse model (see, e.g., Rutsch et al. (2015) Am. J. Hum. Genet. 96:275-282), while the IFIH1 missense mutations A452T, R779H, and L372F, identified in individuals with AGS, were shown to cause type I interferon overproduction (see, e.g., Oda et al. (2014) Am. J. Hum. Genet. 95:121-125).

[0727] The tumor-targeting immunostimulatory bacteria provided herein can be modified to encode MDA5/IFIH1 (see, e.g., SEQ ID NO:310) with gain-of-function mutations selected from T331I, T331R, R337G, L372F, D393V, A452T, A489T, G495R, R720Q, R779H, R779C, G821S, R822Q, and A946T, singly, or in any combination.

[0728] iii. IRF7

[0729] Constitutively active forms of IRF7 (or IRF-7) include mutants in which different C-terminal serines are substituted by phosphomimetic Asp, including IRF7(S477D/S479D), IRF7(S475D/S477D/S479D), and IRF7(S475D/S476D/S477D/S479D/S483D/S487D). IRF7(S477D/S479D) is a strong transactivator for IFNA and RANTES gene expression, and stimulates gene expression, even in the absence of virus infection. IRF7(S475D/S477D/S479D), and IRF7(S475D/S476D/S477D/S479D/S483D/S487D) do not further augment the transactivation activity of IRF7(S477D/S479D), but the transactivation activity of all three mutants is stimulated further by virus infection. The mutant IRF7(4247-467), which localizes to the nucleus in uninfected cells, is a very strong constitutive form of IRF7; it activates transcription more than 1500-fold higher than wild-type IRF7 in unstimulated and virus-infected cells (see, e.g., Lin et al. (2000) J. Biol. Chem. 275(44):34320-34327).

[0730] The immunostimulatory bacteria provided herein can encode and express constitutively active IRF7 mutants, including those with replacements at residues 475-477, 479, 483, and 487, and those with amino acid deletions. The immunostimulatory bacteria encode these proteins on plasmids under the control of promoters and any other desired regulatory signals recognized by mammalian hosts, including humans.

[0731] e. Other Type I IFN Regulatory Proteins

[0732] Other proteins involved in the recognition of DNA/RNA that activate type I IFN responses can be mutated to generate constitutive type I IFN expression. The unmodified and/or modified proteins can be encoded in the immunostimulatory bacteria provided herein, to be used to deliver the protein to the tumor microenvironment, such as to tumor-resident immune cells, to increase expression of type I IFN.

[0733] These proteins include, but are not limited to, proteins designated TRIM56, RIP1, Sec5, TRAF2, TRAF3, TRAF6, STAT1, LGP2, DDX3, DHX9 (DDX9), DDX1, DDX21, DHX15, DHX33, DHX36, DDX60, and SNRNP200.

| Gene | Encoded Protein | Activity/Function |
|---|---|---|
| TRIM56 | Tripartite motif- | Promotes dimerization of STING in response to |
| | containing protein 56/E3 | dsDNA stimulation, resulting in production of IFN-β; |
| | ubiquitin-protein ligase | potentiates extracellular dsRNA-induced expression of |
| | TRIM56 | IFNB1 and IFN-stimulated genes ISG15, IFIT1/ISG56, |
| | | CXCL10, OASL and CCL5; positive regulator of |
| | | TLR3 signaling |
| RIP1/RIPK1 | Receptor-interacting | Transduces inflammatory and cell-death signals |
| | serine/threonine protein | (programmed necrosis) following death receptor |
| | (kinase) 1 | ligation, activation of pathogen recognition receptors |
| | | and DNA damage; indirectly activates NF-κB; directs |
| | | LPS-induced IFN-β synthesis in mice |
| Sec5 (EXOC2) | Exocyst complex | Component of exocyst complex, involved in docking of |
| | component 2 | exocytic vesicles with fusion sites on plasma |
| | | membrane; co-localizes with STING and TBK1 after |
| | | intracellular DNA stimulation, inducing type I IFN |
| | | production |
| TRAF2 | TNF receptor-associated | Regulates activation of NF-κB and JNK/MAPK8; |
| | factor 2 | mediates type I IFN induction |
| TRAF3 | TNF receptor-associated | Regulates activation of NF-κB and MAP kinases; |
| | factor 3 | mediates activation of IRF3; mediates type I IFN |
| | | induction; mediates cytokine production |
| TRAF6 | TNF receptor-associated | Activates NF-κB, JUN, and AP-1; induces type I IFN |
| | factor 6 | production in response to viral infection and |
| | | intracellular dsRNA; induces production of |
| | | proinflammatory cytokines |
| STAT1 | Signal transducer and | Forms part of ISGF3 transcription factor, which binds |
| | activator of transcription 1 | IFN stimulated response elements (ISREs) to activate |
| | | transcription of IFN-stimulated genes (ISGs) |
| LGP2 | Laboratory of genetics | Regulates RIG-I/DDX58- and IFIH1/MDA5-mediated |
| (DHX58) | and physiology 2/ | antiviral signaling |
| | Probable ATP-dependent | |
| | RNA helicase DHX58 | |
| DDX3 | ATP-dependent RNA | Promotes production of type I IFN; acts as viral RNA |
| (DDX3X) | helicase DDX3X | sensor; involved in TBK1 and IKBKE-dependent IRF3 |
| | | activation, leading to induction of IFNB; associates |
| | | with IFNB promoters; associates with MAVS and RIG- |
| | | I to induce signaling in early stages of infection; binds |
| | | MDA5 to enhance its recognition of dsRNA |
| DHX9/DDX9 | DExD/H-box helicase 9/ | Senses viral nucleic acids; triggers host responses to |
| | ATP-dependent RNA | non-self DNA in MyD88-dependent manner; interacts |
| | helicase A | with MAVS to stimulate NF-κB-mediated innate |
| | | immunity against virus infection and activate IRF3 and |
| | | MAPK pathways; potentiates virus-triggered induction |
| | | of IL-6 and IFN-β |
| DDX1 | ATP-dependent RNA | Component of a multi-helicase-TRIF complex that |
| | helicase DDX1 | senses viral double-stranded RNA (dsRNA), activates |
| | | the NF-κB signaling pathway, and induces production |
| | | of type I IFN and proinflammatory cytokines |
| DDX21 | Nucleolar RNA helicase 2 | Component of a multi-helicase-TRIF complex that |
| | | senses viral double-stranded RNA (dsRNA), activates |
| | | the NF-κB signaling pathway, and induces production |
| | | of type I IFN and proinflammatory cytokines |
| DHX15 | Pre-mRNA-splicing factor | Viral RNA sensor that interacts with MAVS to induce |
| (DDX15) | ATP-dependent RNA | type I IFN and proinflammatory cytokine production; |
| | helicase DHX15 | activates IRF3, NF-κB, and MAPK signaling |
| DHX33 | ATP-dependent RNA | Viral dsRNA sensor that interacts with MAVS and |
| (DDX33) | helicase DHX33 | triggers type I IFN response; activates NF-κB, IRF3, |
| | | and MAPK signaling pathways; activates NLRP3 |
| | | inflammasome, resulting in secretion of |
| | | proinflammatory cytokines |
| DHX36 | ATP-dependent | Component of a multi-helicase-TRIF complex that |
| (DDX36) | DNA/RNA helicase | senses viral double-stranded RNA (dsRNA), activates |
| | DHX36 | the NF-κB signaling pathway, and induces production |
| | | of type I IFN and proinflammatory cytokines |
| DDX60 | Probable ATP-dependent | Senses viral RNA and DNA; forms complex with RIG- |
| | RNA helicase DDX60 | I like receptors to promote antivirus activity; positively |
| | | regulates RIG-I and MDA5-dependent type I IFN and |
| | | IFN-inducible gene expression in response to viral |
| | | infection; binds ssRNA, dsRNA, and dsDNA; |
| | | promotes binding of RIG-I to dsRNA |
| SNRNP200 | U5 small nuclear | Senses/binds viral RNA and interacts with TBK1 to |
| | ribonucleoprotein 200 | promote IRF3 activation and type I IFN production |
| | kDa helicase | |

[0734] Gain-of-function variants can be produced, such as by screening and/or by mutagenesis. Site-directed mutagenesis can be performed in vitro to identify mutations with enhanced activity, that lead to higher level and/or constitutive type I IFN expression. Intact genomic DNA can be obtained from non-related patients experiencing auto-immune and auto-inflammatory symptoms, and from healthy individuals, to screen for and identify other products whose expression leads to increased or constitutive type I IFN expression. Whole exome sequencing can be performed, and introns and exons can be analyzed, such that proteins with mutations in the pathways associated with the increased or constitutive expression of type I interferon are identified. After identification of mutations, cDNA molecules encoding the full-length gene, with and without the identified mutation(s), are transfected into a reporter cell line that measures expression of type I interferon. For example, a reporter cell line can be generated where the expression of luciferase is placed under the control of the promoter for IFN-β. A gain-of-function mutant that is constitutively active will promote the expression of IFN-β, whereas the unstimulated wild-type protein will not. Stimulation can be by virus infection, bacterial infection, bacterial nucleic acids, LPS, dsRNA, poly(I:C), or by increasing exogenous levels of the protein's ligand (e.g., CDNs). Identified proteins also include those that enhance an immune response to an antigen(s) of interest in a subject. The immune response comprises a cellular or humoral immune response characterized by one or more of: (i) stimulating type I interferon pathway signaling; (ii) stimulating NF-κB pathway signaling; (iii) stimulating an inflammatory response; (iv) stimulating cytokine production; (v) stimulating dendritic cell development, activity, or mobilization; (vi) any other responses indicative of a product whose expression enhances an immune response; and (vii) a combination of any of (i)-(vi).

[0735] 4. Antibodies and Antibody Fragments

[0736] Advances in antibody engineering have led to the creation of recombinant antibody fragments that have many improvements over conventional monoclonal antibodies, especially in terms of manufacturing, tissue penetration, and ease of use. An example of these is the single-chain fragment variable (scFv), consisting of the variable regions of the heavy (V_{H}) and light (V_{L}) chains of the antibody binding site, joined together by a flexible peptide linker that is generally the (G₄S)₃ sequence (see, e.g., Weisser et al. (2009) Biotechnol. Adv. 27(4):502-520). Other examples include scFv-Fc antibody fragments, in which the V_{H} domain of the scFv is linked to an Fc region. Antibody fragments such as this allow for targeting of antigens in a manner that can be encoded on a plasmid and delivered, as exemplified herein, by an immunostimulatory bacterium. Examples of potential antigens to target, include, but are not limited to, the following listed below.

[0737] a. TGF-β

[0738] Transforming growth factor beta (TGF-β) is a pleiotropic cytokine with numerous roles in embryogenesis, wound healing, angiogenesis, and immune regulation. It exists in three isoforms in mammalian cells, TGF-β1, TGF-β2, and TGF-β3; TGF-β1 is the most predominant in immune cells (see, e.g., Esebanmen et al. (2017) Immunol. Res. 65:987-994). TGF-β's role as an immunosuppressant is arguably its most dominant function. Its activation from a latent form in the tumor microenvironment, in particular, has profound immunosuppressive effects on DCs and their ability to tolerize antigen-specific T-cells. TGF-β also can directly convert Th1 CD4⁺ T-cells to immunosuppressive Tregs, further promoting tumor tolerance (see, e.g., Travis et al. (2014) Annu. Rev. Immunol. 32:51-82). Based on its tumor-specific immunosuppressive functions, and irrespective of its known cancer cell growth and metastasis-promoting properties, inhibition of TGF-β is a cancer therapy target. High levels of TGF-β signaling have been demonstrated in several human tumor types, including colorectal cancer (CRC), hepatocellular carcinoma (HCC), pancreatic ductal adenocarcinoma (PDAC), and non-small-cell lung cancer (NSCLC) (see, e.g., Colak et al. (2017) Trends Cancer 3(1):56-71). Systemic inhibition of TGF-β can lead to unacceptable autoimmune toxicities, and its inhibition should be localized to the tumor microenvironment. One way to accomplish this is to create a soluble TGF-β receptor that acts as a decoy for binding TGF-β (see, e.g., Zhang et al. (2008) J. Immunol. 181:3690-3697). As such, a tumor-targeting immunostimulatory bacteria, containing a TGF-β receptor decoy, provided herein, can bind and remove TGF-β from the tumor microenvironment, thereby breaking tumor immune tolerance and stimulating anti-tumor immunity.

[0739] In addition to TGF-beta binding decoy receptors, other TGF-beta polypeptide antagonists, that can bind to and remove TGF-β from the tumor microenvironment, thereby breaking tumor immune tolerance and stimulating anti-tumor immunity, include anti-TGF-beta antibodies or antibody fragments, anti-TGF-beta receptor antibodies or antibody fragments, and soluble TGF-beta antagonist polypeptides.

[0740] Provided herein are immunostimulatory bacteria, that accumulate in the tumor microenvironment, in tumors, and in particular, in tumor-resident immune cells, that contain plasmids encoding TGF-beta polypeptide antagonists, including, for example, TGF-beta binding decoy receptors (TGF-β receptor decoys), anti-TGF-beta antibodies or antibody fragments, anti-TGF-beta receptor antibodies or antibody fragments, and soluble TGF-beta antagonist polypeptides. The antibody fragments can include any known in the art, or described herein, such as, but not limited to, scFvs and scFv-Fcs.

[0741] b. Bispecific scFvs and T-Cell Engagers

[0742] The use of scFvs has been improved by increasing the valency of binding to the target, often through the use of one or more scFv fragments (bi-specific, tri-specific, etc.), joined together by a long linker. Bi-specific T-cell engager (sold under the trademark BiTE®) constructs are a class of artificial bispecific monoclonal antibodies that are utilized in cancer immunotherapy, and are formed by linking two single-chain variable fragments (scFvs), such that one scFv binds CD3 on the surface of cytotoxic T-cells, and the other binds a specific tumor-associated antigen (TAA). BiTEs® thus target T-cells to tumor cells, stimulating T-cell activation, cytokine production, and tumor cell cytotoxicity, independently of MHC class I or co-stimulatory molecules. Two examples of bi-specific T-cell engagers (BiTEs®) have been approved by the FDA, including catumaxomab, which is directed against the tumor antigen EpCAM, and against CD3, and is used in the treatment of malignant ascites, and blinatumomab, a BiTE® antibody directed against CD19 and CD3, which is used for the treatment of relapsed, refractory acute lymphoblastic leukemia (ALL; see, e.g., Ahamadi-Fesharaki et al. (2019) Mol. Ther. Oncolytics 14:38-56). Other bi-specific T-cell engagers (BiTEs®) target a variety of antigens, including, for example, carcinoembryonic antigen (CEA), CD3, prostate-specific membrane antigen (PSMA), EGFR, EphA2, Her2, ADAM17/TACE, prostate stem cell antigen (PSCA), and melanoma-associated chondroitin sulfate proteoglycan (MCSP). As exemplified herein, a BiTE® antibody also can be expressed from a plasmid following delivery by an immunostimulatory bacterium.

[0743] c. Anti-PD-1/Anti-PD-L1 Antibodies

[0744] Programmed cell death protein 1 (PD-1) is an immune-inhibitory receptor that is involved in the negative regulation of immune responses. Its cognate ligand, programmed death-ligand 1 (PD-L1), is expressed on antigen-presenting cells (APCs), and upon binding to PD-1 on T-cells, leads to loss of CD8⁺ T-cell effector function, inducing T-cell tolerance. The expression of PD-L1 is often associated with tumor aggressiveness and reduced survival in certain human cancers (see, e.g., Gao et al. (2009) Clin. Cancer Res. 15(3):971-979).

[0745] Antibodies designed to block immune checkpoints, such as anti-PD-1 (for example, pembrolizumab, and nivolumab) and anti-PD-L1 (for example, atezolizumab, avelumab, and durvalumab) antibodies, can prevent T-cell anergy and break immune tolerance. Only a fraction of treated patients, however, exhibit clinical benefit, and those that do, often present with autoimmune-related toxicities (see, e.g., Ribas (2015) N. Engl. J. Med. 373(16):1490-1492; and Topalian et al. (2012) N. Engl. J. Med. 366(26):2443-2454). Besides acquiring toxicity, anti-PD-1/anti-PD-L1 therapy often leads to resistance, and the concomitant use of anti-CTLA-4 antibodies (for example, ipilimumab) has shown limited success in clinical trials, with significantly additive toxicity. To limit the toxicity and enhance the potency of PD-1/PD-L1 blockade, an immunostimulatory bacterium, containing a plasmid encoding an antibody or antibody fragment, such as an scFv or scFv-Fc, and others known in the art or described herein, against PD-1 or against PD-L1, will synergize with activation of immune cells to potentiate anti-tumor immunity.

[0746] d. Anti-CTLA-4 Antibodies

[0747] CTLA-4 (cytotoxic T-lymphocyte-associated protein 4), also known as CD152 (cluster of differentiation 152), is another immune-inhibitory receptor that functions as an immune checkpoint, and downregulates immune responses. CTLA-4 is constitutively expressed in regulatory T-cells (Tregs, or T_{regs}), and contributes to their inhibitory function, but is upregulated in conventional T-cells only after activation. CTLA-4 functions as an immune checkpoint by transmitting inhibitory signals to T-cells. CTLA-4 is homologous to the T-cell co-stimulatory protein, CD28, and both molecules bind to CD80 (also known as B7-1 or B7.1) and CD86 (also known as B7-2 or B7.2) ligands on antigen-presenting cells (APCs). The binding of CTLA-4 to the ligands transmits an inhibitory signal to T-cells, whereas the binding of CD28 transmits a stimulatory signal.

[0748] Following T-cell activation, CTLA-4 receptors are induced, which then outcompete CD28 receptors on T-cells, for binding to CD80 and CD86 ligands on the surfaces of APCs. CTLA-4 binds to CD80 and CD86 with greater affinity and avidity than CD28, thus enabling it to outcompete CD28 for its ligands, resulting in the transmittal of inhibitory signals to T-cells, and an immune inhibitory response. T-cell activation through the T-cell receptor and CD28 leads to increased expression of CTLA-4.

[0749] Optimal T-cell priming requires co-stimulatory signals resulting from the ligation of T-cell CD28 with CD80 and/or CD86. The blockade of CTLA-4 from binding to these ligands thus enhances T-cell priming, and allows for the induction of an anti-tumor immune response.

[0750] In some embodiments, the immunostimulatory bacterial strains provided herein contain plasmids encoding anti-CTLA-4 antibodies, including fragments thereof, such as, but not limited to, anti-CTLA-4 scFvs (see, e.g., SEQ ID NO:403 for an exemplary human anti-CTLA-4 scFv fragment), and anti-CTLA-4 scFv-Fcs (see, e.g., SEQ ID NO:402, for an exemplary human anti-CTLA-4 scFv-Fc fragment; see, also, Example 20).

[0751] e. Additional Exemplary Checkpoint Targets

[0752] Exemplary immune checkpoint targets, for which an scFv, or any other recombinant antibody fragment against them can be prepared, or are exemplified herein include, but are not limited to, those listed in the table below:

Checkpoint target

CTLA-4
PD-L1 (B7-H1)
PD-L2
PD-1, PD-2
IDO1
IDO2
SIRP alpha (CD47)
VISTA (B7-H5)
LIGHT
HVEM
CD28
LAG3, TIM3, TIGIT
Galectin-9
CEACAM1, CD155, CD112, CD226, CD244 (2B4)
B7-H2, B7-H3, CD137, ICOS, GITR, B7-H4, B7-H6
CD137, CD27, CD40, CD40L, CD48, CD70, CD80,
CD86, CD137 (4-1BB), 4-1BBL, CD200, CD272
(BTLA), CD160
A2a receptor, A2b receptor, HHLA2, ILT-2, ILT-4,
gp49B, PIR-B
OX40, OX-40L, HLA-G, ILT-2/4
KIR, TIM1, TIM4
CLEVER-1/Stabilin-1

[0753] 5. Combinations of Immunomodulatory Proteins can have Synergistic Effects and/or Complementary Effects

[0754] Cytokines are powerful modulators of the anti-tumor immune response. Cytokine combinations are known to have profound synergistic effects on different immune compartments involving T-cells, NK cells, and myeloid cells (including dendritic cells and macrophages). Cytokines are known to play major roles in antigen priming by dendritic cells, survival and proliferation of innate immune cells and antigen-specific T-cells, and the cytotoxic activity of NK and T-cells. Cytokine combinations must be properly chosen to maximize biological responses and enhance anti-tumor immunity. For example, in a murine model of hepatitis, IFN-α alone was found to enhance the CD8⁺ T-cell cytolytic function of virally infected cells, while IL-15 alone enhanced the proliferation of activated lymphocytes. Together, they maximally suppressed hepatitis B (HBV) infection (see e.g., Di Scala et al. (2016) J Virol. 90(19):8563-8574). In another example, combinations of the cytokines IL-15+IL-18, and IL-15+IL-21, were able to enhance the production of IFN-γ from human NK and T-cells (see, e.g., Strengell et al. (2003) J. Immunol. 170(11):5464-5469). In another example, IL-2+IL-18 synergized to enhance IFN-γ production and increase the cytolytic function of CD4⁺ T-cells, CD8⁺ T cells, and NK lymphocytes (see, e.g., Son et al. (2001) Cancer Res. 61(3):884-888). Additionally, IL-12 and IL-18 were found to synergize to promote antigen-CD3 T-cell ligation-independent production of IFN-γ from human T-cells (see, e.g., Tominaga et al. (2000) Int. Immunol. 12(2):151-160). Combinations of cytokines are powerful enhancers of T-cell function, but the FDA-approved anti-cancer cytokines are too toxic to be dosed systemically and are thus rarely used, and combinations of systemically-administered cytokines only compound the toxicity (see, e.g., Conlon et al. (2019) J. Interferon Cytokine Res. 39(1):6-21).

[0755] The immunostimulatory bacteria provided herein solve these problems. Provided are immunostimulatory bacteria containing plasmids encoding multiple therapeutic products, such as immunomodulatory proteins, that allow for tumor-specific delivery of cytokine combinations, and/or combinations with other therapeutic products, such as the inducers of type I interferon discussed herein, and others, including co-stimulatory molecules, chemokines, and antibodies and fragments thereof. These immunostimulatory bacteria achieve powerful and synergistic immuno-activation without the systemic toxicities and pharmacokinetic (PK) liabilities associated with direct IV administration of the cytokines and other therapeutic products.

[0756] Combinations of therapeutic products that can be encoded on the plasmids in the immunostimulatory bacteria provided herein include, but are not limited to, for example, two or more cytokines; one or more cytokines and an inducer of type I IFN (e.g., STING, IRF3, IRF7, MDA5, RIG-I, and constitutively active, GOF variants thereof), and/or a co-stimulatory molecule (e.g., 4-1BBL, 4-1BBLΔcyt, and other variants of 4-1BBL discussed herein); a TGF-β decoy receptor and one or more cytokines; a TGF-β decoy receptor and an inducer of type I IFN; a TGF-β decoy receptor, one or more cytokines, and/or an inducer of type I IFN, and/or a co-stimulatory molecule; an antibody (e.g., against an immune checkpoint, such as CTLA-4) and one or more cytokines; an antibody and an inducer of type I IFN; an antibody, one or more cytokines, and/or an inducer of type I IFN, and/or a co-stimulatory molecule; a co-stimulatory molecule agonist (e.g., a CD40 agonist) and one or more cytokines; a co-stimulatory molecule agonist and an inducer of type I IFN; and a co-stimulatory molecule agonist, one or more cytokines, and/or an inducer of type I IFN, and/or a co-stimulatory molecule.

[0757] As discussed below, the multiple therapeutic product expression cassettes can include single promoter constructs and/or dual/multiple promoter constructs, as well as post-transcriptional regulatory elements, and other regulatory elements, such as enhancers, polyadenylation signals, terminators, signal peptides, etc. The nucleic acid sequences can be codon optimized to increase protein expression, and generally, are under control of a eukaryotic promoter. Particular constructs and details thereof are described elsewhere herein.

[0758] Among the immunostimulatory bacteria provided herein are those that contain plasmids encoding immunostimulatory proteins (e.g., cytokines, chemokines, co-stimulatory molecules), and/or gene products with gain-of-function mutations that increase immune responses in the tumor microenvironment (e.g., cytosolic DNA/RNA sensors that induce type I IFN), and/or antibodies and fragments thereof, and/or other therapeutic products that enhance the anti-tumor response, such as TGF-β and/or IL-6 decoy receptors, and/or TGF-β antagonizing polypeptides. These immunostimulatory bacteria that encode the cytokines, gain-of-function products/type I IFN pathway proteins, and/or chemokines, and/or co-stimulatory molecules, and/or antibodies and fragments thereof, such as single-chain antibodies, and other therapeutic products discussed herein, include the immunostimulatory bacteria that preferentially infiltrate the tumor microenvironment, tumors, and tumor-resident immune cells. The immunostimulatory bacteria also include those in which the genome is modified so that they induce less cell death in tumor-resident immune cells, whereby the immunostimulatory bacteria accumulate in tumor-resident myeloid cells, to achieve high level ectopic expression of multiplexed genetic payloads in the target cells, and deliver the therapeutic products/immunomodulatory proteins to the tumor microenvironment (TME), to stimulate the immune response against the tumor. In particular, the immunostimulatory bacteria provided herein include up to about 8 or 8 modifications as described herein, including, but not limited to, adenosine auxotrophy, csgD⁻, pagP⁻, msbB⁻, flagellin⁻ (fliC⁻/fljB⁻), purI⁻, ansB⁻, asd⁻, and any other modifications described herein or known to improve targeting to, or accumulation in, the tumor microenvironment and/or tumor-resident myeloid cells, or to improve safety and tolerability (allowing for a higher dose), reduce the immunosuppressive cytokine profile, improve T-cell quality and function, limit replication in healthy tissues, eliminate biofilms, and improve the anti-tumor immune response, or to impart any of the desirable and advantageous properties discussed elsewhere herein.

[0759] The immunostimulatory bacteria further can encode other therapeutic products, such as a tumor antigen from the subject's tumor, to enhance the response against the particular tumor. Any of the immunostimulatory bacteria provided herein and described above and below can be modified to encode the therapeutic products, such as cytokines, chemokines, co-stimulatory molecules, and gain-of-function type I IFN pathway product(s). The therapeutic products are encoded on a plasmid under control of a promoter recognized by the host, and any other desired regulatory sequences recognized in a eukaryotic, such as a human, or other animal, or mammalian, subject. Generally, the nucleic acid encoding the product is under the control of an RNA polymerase II promoter. Additionally, any of the bacteria described herein for modification, such as any of the strains of Salmonella, Shigella, E. coli, Bifidobacteria, Rickettsia, Vibrio, Listeria, Klebsiella, Bordetella, Neisseria, Aeromonas, Francisella, Cholera, Corynebacterium, Citrobacter, Chlamydia, Haemophilus, Brucella, Mycobacterium, Mycoplasma, Legionella, Rhodococcus, Pseudomonas, Helicobacter, Bacillus, and Erysipelothrix, or an attenuated strain thereof, or a modified strain thereof, can be modified by introducing a plasmid containing, or by encoding on a plasmid in the bacteria, nucleic acid encoding the therapeutic product(s) under control of an RNA polymerase promoter recognized by the host. The therapeutic products are expressed in the infected subject's cells. The immunostimulatory bacteria include those that are modified, as described herein, to accumulate in, or to preferentially infect, tumors, the TME and/or tumor-resident myeloid cells. For example, immunostimulatory bacteria that encode gain-of-function products leading to the expression of, or the constitutive expression of, type I interferon (IFN), such as IFN-beta, and/or other therapeutic products as discussed herein, further are modified to have reduced ability or no ability to infect epithelial cells, but are able to infect phagocytic cells, including tumor-resident immune cells, and/or the immunostimulatory bacteria are modified so that they do not kill the infected phagocytic cells.

[0760] As described herein, genes involved in the SPI-1 pathway, and flagella, activate the inflammasome in phagocytic cells (immune cells), triggering pyroptosis. Knocking out SPI-1 genes and genes that encode flagella, decreases or eliminates pyroptosis of phagocytic cells, and also, eliminates infection of epithelial cells, resulting in increased infection of phagocytic cells. Provided are immunostimulatory bacteria that accumulate in phagocytic cells, particularly tumor-resident immune cells, such as, for example, myeloid-derived suppresser cells (MDSCs), tumor-associated macrophages (TAMs), and dendritic cells (DCs), in which they express the genetic payloads/therapeutic products encoded on plasmids that are controlled by eukaryotic promoters, such as those recognized by RNA polymerase II, and include other eukaryotic regulatory signals, as discussed herein. Expressed therapeutic products include those that evoke immune responses, such as through pathways that increase or induce type I interferons, which increase the host response in the tumor microenvironment. The immunostimulatory bacteria also can encode immunostimulatory proteins, such as IL-2 and/or other cytokines, and/or other immunostimulatory proteins and therapeutic products, as discussed herein, further enhancing the immune response in the tumor microenvironment.

[0761] The immunostimulatory bacteria can encode products, referred to as cytosolic DNA/RNA sensors, that evoke immune responses when exposed to nucleic acids, such as RNA, DNA, nucleotides, dinucleotides, cyclic nucleotides, cyclic dinucleotides, and other such molecules, in the cytosol of cells. The immunostimulatory bacteria herein, encode modified therapeutic products that constitutively evoke immune responses, and do not require the presence of the DNA/RNA in the cytosol. Exemplary of such are components of pathways that induce type I interferon expression. The therapeutic products contemplated herein include modified forms of these cytosolic DNA/RNA sensors, that have constitutive activity or increased activity (i.e., gain-of-function products), such that type I interferon(s) is/are expressed or produced in the absence of nucleotides, dinucleotides, cyclic nucleotides, cyclic dinucleotides, and other such ligands, in the cytosol of cells. Expression of these modified products in cells, particularly in tumor cells, including tumor-resident immune cells, leads to constitutive expression of type I interferons, including interferon-β, in the tumor microenvironment. Because the immunostimulatory bacteria that express these gain-of-function products accumulate in or preferentially infect tumor cells/the TME/tumor-resident immune cells, the therapeutic products are expressed in the tumor microenvironment, resulting in increased immune responses in the tumor microenvironment.

[0762] Exemplary gene products that can be encoded in the immunostimulatory bacteria and other vehicles, include, but are not limited to, proteins that sense or are involved in innate pathways that recognize cytosolic DNA/RNA and activate type I interferon production. Proteins involved in innate DNA/RNA recognition that activate type I interferon include, but are not limited to: STING, RIG-I, MDA5, IRF3, IRF7, TRIM56, RIP1/RIPK1, Sec5/EXOC2, TRAF2, TRAF3, TRAF6, STAT1, LGP2/DHX58, DDX3/DDX3X, DHX9/DDX9, DDX1, DDX21, DHX15/DDX15, DHX33/DDX33, DHX36/DDX36, DDX60, and SNRNP200. Gain-of-function mutations in any of these proteins that result in constitutive type I interferon expression are known, or can be identified, and the mutants can be delivered by the immunostimulatory bacteria to the tumor microenvironment, such as by infection of phagocytic cells, or by targeting and binding to tumor cells.

[0763] The gain-of-function mutations include those identified from individuals with disorders resulting from constitutive type I interferon expression. Exemplary of gain-of-function products are those that occur in subjects with interferonopathies. As noted above, mutations can be identified by screening, to generate gain-of-function products as well.

[0764] The nucleic acids encoding the therapeutic products further can be modified to improve properties for expression. Modifications include, for example, codon optimization to increase transcriptional efficiency in a mammalian, particularly human, subject, such as reduction of GC content or CpG dinucleotide content, removal of cryptic splicing sites, adding or removing (generally removing) CpG islands to improve expression in eukaryotic cells, and replacement of TATA box and/or terminal signals to increase transcriptional efficiency. Codons can be optimized for increasing translation efficiency by altering codon usage bias, decreasing GC content, decreasing mRNA secondary structure, removing premature PolyA sites, removing RNA instability motifs (ARE), reducing stable free energy of mRNA, modifying internal chi sites and ribosomal binding sites, and reducing RNA secondary structures. Additional modifications to improve expression, and to maintain or enhance bacterial fitness have been incorporated into the immunostimulatory bacteria. These are described in sections below, and detailed and exemplified in the working Examples below.

[0765] As described above, type I interferon induction pathways, mediated by host recognition of cytosolic nucleic acids, such as single-stranded and double-stranded RNA, cyclic di-nucleotides (CDNs), and other such forms of nucleic acids, induce type I IFN. There also are Toll-Like Receptor (TLR)-independent type I IFN pathways, mediated by host recognition of single-stranded (ss) and double-stranded (ds) RNA in the cytosol. These are sensed by RNA helicases, including retinoic acid-inducible gene I (RIG-I), melanoma differentiation-associated gene 5 (MDA5), and through IFN-β promoter stimulator 1 (IPS-1) adaptor protein-mediated phosphorylation of the IRF3 transcription factor, leading to induction of IFN-β (see, e.g., Ireton and Gale (2011) Viruses 3(6):906-919). As discussed herein, proteins in these pathways can be modified, or can exist as variants, that result in constitutive expression of type I interferons (also referred to as interferon type 1), which include IFN-α and IFN-β. Exemplary of such proteins are the modified STING polypeptides provided herein, which include those with mutations that result in constitutive expression of the type I interferons so that the interferons are expressed in the absence of induction, and also, chimeric STING proteins, such as those in which the a C-terminal tail (CTT) portion is replaced with a CTT portion from a STING protein from a second species, wherein the STING protein of the second species has lower NF-κB signaling activity than the NF-κB signaling activity of human STING, and the TRAF6 binding site in the CTT optionally is deleted.

[0766] Therapy with the immunostimulatory bacteria provided herein can be combined with any other anti-cancer therapy, including checkpoint inhibitor therapies and, as discussed above and elsewhere herein, other cancer treatments and chemotherapy.

[0767] 6. Immunostimulatory Bacteria that Deliver Combination Therapies

[0768] The immunostimulatory bacteria herein can be used to provide more than one therapeutic product, particularly those that are for anti-cancer therapy. In general, the products are complementary products to enhance and re-program the anti-tumor immune response. The immunostimulatory bacteria, by virtue of the genomic modifications described herein, particularly the combination of several or of all of asd⁻, flagellin⁻ (fliC⁻/fljB⁻), pagP⁻, csgD⁻, purI⁻, adenosine auxotrophy, msbB⁻, ansB®, and any other modifications described elsewhere herein or known to those of skill in the art, accumulate in the tumor microenvironment (TME) and infect tumor-resident immune cells (myeloid cells). The immunostimulatory bacteria contain plasmids, encoding complementary therapeutic products, under control of a promoter or promoters recognized by the host, and any other desired regulatory sequences recognized in a eukaryotic, such as a human, or other animal, or mammalian, subject, to effect expression of the encoded products, and, also, secretion of the products. The immunostimulatory bacteria accumulate in the TME, particularly in tumor-resident immune cells, including myeloid-derived suppressor cells (MDSCs), tumor-associated macrophages (TAMs), and dendritic cells (DCs), where the encoded therapeutic products are expressed and then secreted into the tumor microenvironment to achieve an anti-tumor effect. By appropriate combination of products, the anti-tumor effect can be enhanced by virtue of interactions of the various products with the host immune system.

[0769] As discussed elsewhere herein, the immunostimulatory bacteria, containing plasmids encoding therapeutic products, with a single promoter and open reading frame (ORF), can express two (or more) proteins through the use of viral internal ribosomal entry sites (IRES), which are cap-independent, or through translational read-through of 2A peptides (e.g., T2A, P2A, E2A, or F2A), and subsequent self-cleavage into equally expressed co-proteins. Alternatively, the genetic payloads/therapeutic products can be expressed using dual or multiple promoter constructs, where each protein is expressed under the control of a separate promoter. A combination of single and dual/multiple promoter constructs, to express three or more proteins, also can be included on the plasmids. Generally, the nucleic acids encoding the therapeutic products are under the control of RNA polymerase II promoters. For example, promoters include, but are not limited to EF-1α, CMV, SV40, UBC, CBA, PGK, GUSB, GAPDH, EIF41A, CAG, CD68, and synthetic MND promoters. The plasmids can contain other regulatory elements, such as post-transcriptional regulatory elements (PREs; e.g., WPRE, HPRE), polyadenylation signal sequences, terminators, enhancers, secretion signals (also known as signal peptides/sequences, leader peptides/sequences), DNA nuclear targeting sequences (DTS), and other regulatory elements, described elsewhere herein or known to those of skill in the art, that can enhance or increase the expression and/or secretion of the encoded therapeutic products.

[0770] The genetic payloads or therapeutic products encoded on the plasmids include immunostimulatory proteins, such as cytokines, chemokines, and co-stimulatory molecules; cytosolic DNA/RNA sensors that induce type I IFN and gain-of-function/constitutively active mutants/variants thereof; antibodies and fragments thereof; bi-specific T-cell engagers (BiTEs®); soluble TGF-β receptors that act as decoys for binding TGF-β, or TGF-β antagonizing polypeptides; IL-6 binding decoy receptors; interfering RNAs (e.g., siRNA, shRNA, miRNA); and other therapeutic products as discussed below and elsewhere herein, and as known in the art; and complementary combinations of all of the preceding therapeutic products. In some embodiments, the cytokines can be encoded on the plasmid within the immunostimulatory bacteria, with a membrane anchoring motif, such as a transmembrane domain, and a collagen-binding domain.

[0771] The immunostimulatory proteins, including cytokines, chemokines, and co-stimulatory molecules, that can be encoded on the plasmids include, but are not limited to, IL-2, IL-7, IL-12p70 (IL-12p40+IL-12p35), IL-15, IL-15/IL-15Ra chain complex, IL-18, IL-21, IL-23, IL-36 gamma, interferon-α, interferon-β, IL-2 that has attenuated binding to IL-2Ra, IL-2 that is modified so that it does not bind to IL-2Ra, CXCL9, CXCL10, CXCL11, CCL3, CCL4, CCL5, proteins that are involved in or that effect or potentiate the recruitment and/or persistence of T-cells, CD40, CD40 Ligand (CD40L), OX40, OX40 Ligand (OX40L), 4-1BB, 4-1BB Ligand (4-1BBL), 4-1BBL with a deletion in the cytoplasmic domain (4-1BBLΔcyt), ICOS, CD27, members of the B7-CD28 family, and members of the tumor necrosis factor receptor (TNFR) superfamily. The immunostimulatory proteins also include truncated co-stimulatory molecules, such as, for example, 4-1BBL, CD80, CD86, CD27L, B7RP1 and OX40L, with a full-length cytoplasmic domain, or with a truncated, or partial, or partial with modifications to ensure proper orientation, cytoplasmic domain deletion, for expression on an antigen-presenting cell (APC), where the truncated gene product is capable of constitutive immunostimulatory signaling to a T-cell through co-stimulatory receptor engagement, and is unable to counter-regulatory signal to the APC due to a deleted cytoplasmic domain.

[0772] The cytosolic DNA/RNA sensors, that induce or activate type I IFN production include, but are not limited to, STING, RIG-I, MDA5, IRF3, IRF5, and IRF7, and gain-of-function (GOF) or constitutively active variants thereof. Other proteins involved in the recognition of DNA/RNA that activate type I IFN responses, that can be mutated to generate constitutive type I IFN expression and can be encoded on the plasmids, include, but are not limited to, TRIM56, RIP1, Sec5, TRAF2, TRAF3, TRAF6, STAT1, LGP2, DDX3, DHX9, DDX1, DDX21, DHX15, DHX33, DHX36, DDX60, and SNRNP200.

[0773] Other therapeutic products that can be encoded on the plasmids delivered by the immunostimulatory bacteria herein, or that can be co-administered with the bacteria, that enhance or increase the anti-tumor response, include, but are not limited to, antibodies and fragments thereof, for example, TGF-β inhibitory antibodies; anti-IL-6 antibodies; antibodies against checkpoint inhibitors, such as PD-1, PD-L1, and CTLA-4; and antibodies against, or inhibitors of, VEGF, CD73, CD38, Siglec-15, EGFR, Her2, Mesothelin, and BCMA. Also contemplated for expression on the plasmid, or for co-administration with the immunostimulatory bacteria herein, are bispecific T-cell engagers (BiTEs®), IL-6 binding decoy receptors, TGF-beta binding decoy receptors, and TGF-beta polypeptide antagonists. Any of these antibodies, inhibitors, or decoy receptors can be co-administered with the immunostimulatory bacteria herein. In some embodiments, PARP (poly (ADP)-ribose polymerase) inhibitors, histone deacetylase (HDAC) inhibitors, and/or chemotherapy, also can be co-administered with any of the therapeutic products listed above, alone, or in any combination.

[0774] Exemplary of complementary combinations of therapeutic products that can be encoded on the plasmids in the immunostimulatory bacteria herein include, but are not limited to:

[0775] IL-2 and IL-12p70; IL-2 and IL-21; IL-2, IL-12p70, and a STING GOF variant; IL-2, IL-21, and a STING GOF variant; IL-2, IL-12p70, a STING GOF variant, and 4-1BBL (including 4-1BBLΔcyt); and IL-2, IL-21, a STING GOF variant, and 4-1BBL (including 4-1BBLΔcyt);

[0776] IL-15/IL-15Ra and a STING GOF variant; IL-15/IL-15Rα, a STING GOF variant, and 4-1BBL (including 4-1BBLΔcyt); IL-15/IL-15Ra and IL-12p70; IL-15/IL-15Ra and IL-21; IL-15/IL-15Rα, IL-12p70, and a STING GOF variant; IL-15/IL-15Rα, IL-21, and a STING GOF variant; IL-15/IL-15Rα, IL-12p70, a STING GOF variant, and 4-1BBL (including 4-1BBLΔcyt); and IL-15/IL-15Rα, IL-21, a STING GOF variant, and 4-1BBL (including 4-1BBLΔcyt);

[0777] IL-12p70 and IL-21; IL-12p70, IL-21, and a STING GOF variant; IL-12p70, IL-21, a STING GOF variant, and 4-1BBL (including 4-1BBLΔcyt); IL-12p70 and a STING GOF variant; IL-12p70, a STING GOF variant, and 4-1BBL (including 4-1BBLΔcyt); IL-12p70 and IL-18; IL-12p70, IL-18, and a STING GOF variant; and IL-12p70, IL-18, a STING GOF variant, and 4-1BBL (including 4-1BBLΔcyt);

[0778] a TGF-β decoy receptor, IL-2, and IL-12p70; a TGF-β decoy receptor, IL-2, and IL-21; a TGF-β decoy receptor, IL-2, IL-12p70, and a STING GOF variant; a TGF-β decoy receptor, IL-2, IL-21, and a STING GOF variant; a TGF-β decoy receptor, IL-2, IL-12p70, a STING GOF variant, and 4-1BBL (including 4-1BBLΔcyt); and a TGF-β decoy receptor, IL-2, IL-21, a STING GOF variant, and 4-1BBL (including 4-1BBLΔcyt);

[0779] a TGF-β decoy receptor, IL-15/IL-15Rα, and a STING GOF variant; a TGF-β decoy receptor, IL-15/IL-15Rα, a STING GOF variant, and 4-1BBL (including 4-1BBLΔcyt); a TGF-β decoy receptor, IL-15/IL-15Rα, and IL-12p70; a TGF-β decoy receptor, IL-15/IL-15Rα, and IL-21; a TGF-β decoy receptor, IL-15/IL-15Rα, IL-12p70, and a STING GOF variant; a TGF-β decoy receptor, IL-15/IL-15Rα, IL-21, and a STING GOF variant; a TGF-β decoy receptor, IL-15/IL-15Rα, IL-12p70, a STING GOF variant, and 4-1BBL (including 4-1BBLΔcyt); and a TGF-β decoy receptor, IL-15/IL-15Rα, IL-21, a STING GOF variant, and 4-1BBL (including 4-1BBLΔcyt);

[0780] a TGF-β decoy receptor, IL-12p70, and IL-21; a TGF-β decoy receptor, IL-12p70, IL-21, and a STING GOF variant; a TGF-β decoy receptor, IL-12p70, IL-21, a STING GOF variant, and 4-1BBL (including 4-1BBLΔcyt); a TGF-β decoy receptor and IL-12p70; a TGF-β decoy receptor, IL-12p70, and a STING GOF variant; a TGF-decoy receptor, IL-12p70, a STING GOF variant, and 4-1BBL (including 4-1BBLΔcyt); a TGF-β decoy receptor, IL-12p70, and IL-18; a TGF-β decoy receptor, IL-12p70, IL-18, and a STING GOF variant; a TGF-β decoy receptor, IL-12p70, IL-18, a STING GOF variant, and 4-1BBL (including 4-1BBLΔcyt); and a TGF-β decoy receptor and a STING GOF variant;

[0781] an anti-CTLA-4 antibody, IL-2, and IL-12p70; an anti-CTLA-4 antibody, IL-2, and IL-21; an anti-CTLA-4 antibody, IL-2, IL-12p70, and a STING GOF variant; an anti-CTLA-4 antibody, IL-2, IL-21, and a STING GOF variant; an anti-CTLA-4 antibody, IL-2, IL-12p70, a STING GOF variant, and 4-1BBL (including 4-1BBLΔcyt); and an anti-CTLA-4 antibody, IL-2, IL-21, a STING GOF variant, and 4-1BBL (including 4-1BBLΔcyt);

[0782] an anti-CTLA-4 antibody, IL-15/IL-15Rα, and a STING GOF variant; an anti-CTLA-4 antibody, IL-15/IL-15Rα, a STING GOF variant, and 4-1BBL (including 4-1BBLΔcyt); an anti-CTLA-4 antibody, IL-15/IL-15Rα, and IL-12p70; an anti-CTLA-4 antibody, IL-15/IL-15Rα, and IL-21; an anti-CTLA-4 antibody, IL-15/IL-15Rα, IL-12p70, and a STING GOF variant; an anti-CTLA-4 antibody, IL-15/IL-15Rα, IL-21, and a STING GOF variant; an anti-CTLA-4 antibody, IL-15/IL-15Rα, IL-12p70, a STING GOF variant, and 4-1BBL (including 4-1BBLΔcyt); and an anti-CTLA-4 antibody, IL-15/IL-15Rα, IL-21, a STING GOF variant, and 4-1BBL (including 4-1BBLΔcyt);

[0783] an anti-CTLA-4 antibody, IL-12p70, and IL-21; an anti-CTLA-4 antibody, IL-12p70, IL-21, and a STING GOF variant; an anti-CTLA-4 antibody, IL-12p70, IL-21, a STING GOF variant, and 4-1BBL (including 4-1BBLΔcyt); an anti-CTLA-4 antibody and IL-12p70; an anti-CTLA-4 antibody, IL-12p70, and a STING GOF variant; an anti-CTLA-4 antibody, IL-12p70, a STING GOF variant, and 4-1BBL (including 4-1BBLΔcyt); an anti-CTLA-4 antibody, IL-12p70, and IL-18; an anti-CTLA-4 antibody, IL-12p70, IL-18, and a STING GOF variant; an anti-CTLA-4 antibody, IL-12p70, IL-18, a STING GOF variant, and 4-1BBL (including 4-1BBLΔcyt); and an anti-CTLA-4 antibody and a STING GOF variant;

[0784] a CD40 agonist, IL-2, and IL-12p70; a CD40 agonist, IL-2, and IL-21; a CD40 agonist, IL-2, IL-12p70, and a STING GOF variant; a CD40 agonist, IL-2, IL-21, and a STING GOF variant; a CD40 agonist, IL-2, IL-12p70, a STING GOF variant, and 4-1BBL (including 4-1BBLΔcyt); and a CD40 agonist, IL-2, IL-21, a STING GOF variant, and 4-1BBL (including 4-1BBLΔcyt);

[0785] a CD40 agonist, IL-15/IL-15Rα, and a STING GOF variant; a CD40 agonist, IL-15/IL-15Rα, a STING GOF variant, and 4-1BBL (including 4-1BBLΔcyt); a CD40 agonist, IL-15/IL-15Rα, and IL-12p70; a CD40 agonist, IL-15/IL-15Rα, and IL-21; a CD40 agonist, IL-15/IL-15Rα, IL-12p70, and a STING GOF variant; a CD40 agonist, IL-15/IL-15Rα, IL-21, and a STING GOF variant; a CD40 agonist, IL-15/IL-15Rα, IL-12p70, a STING GOF variant, and 4-1BBL (including 4-1BBLΔcyt); and a CD40 agonist, IL-15/IL-15Rα, IL-21, a STING GOF variant, and 4-1BBL (including 4-1BBLΔcyt); and

[0786] a CD40 agonist, IL-12p70, and IL-21; a CD40 agonist, IL-12p70, IL-21, and a STING GOF variant; a CD40 agonist, IL-12p70, IL-21, a STING GOF variant, and 4-1BBL (including 4-1BBLΔcyt); a CD40 agonist and IL-12p70; a CD40 agonist, IL-12p70, and a STING GOF variant; a CD40 agonist, IL-12p70, a STING GOF variant, and 4-1BBL (including 4-1BBLΔcyt); a CD40 agonist, IL-12p70, and IL-18; a CD40 agonist, IL-12p70, IL-18, and a STING GOF variant; a CD40 agonist, IL-12p70, IL-18, a STING GOF variant, and 4-1BBL (including 4-1BBLΔcyt); and a CD40 agonist and a STING GOF variant.

[0787] In all combinations including 4-1BBL, the 4-1BBL molecule can be a full-length protein (see, e.g., SEQ ID NOs:389 and 393, for human and mouse 4-1BBL, respectively); a 4-1BBL variant with the cytoplasmic domain deleted (4-1BBLΔcyt; see e.g., SEQ ID NOs:390 and 394, for human and murine 4-1BBLΔcyt, respectively); a 4-1BBL variant with a truncated (i.e., not fully deleted) cytoplasmic domain (4-1BBLcyt trunc; see, e.g., SEQ ID NOs:391-392 and SEQ ID NOs:395-396, for exemplary human and mouse 4-1BBLcyt trunc variants, respectively); or a 4-1BBL molecule with a modified cytoplasmic domain, in which one or more Ser residues, which act as phosphorylation sites, are replaced at an appropriate locus or loci, such as, for human 4-1BBL, with reference to SEQ ID NO:389, Ser5 and Ser8, with a residue that reduces or eliminates reverse signaling. Additionally, all combinations including an anti-CTLA-4 antibody, can include an anti-CTLA-4 antibody fragment, such as an anti-CTLA-4 scFv (see, e.g., SEQ ID NOs:403 and 404, for exemplary human and mouse anti-CTLA-4 scFv fragments, respectively), or an anti-CTLA-4 scFv-Fc (see, e.g., SEQ ID NOs:402 and 405, for exemplary human and mouse anti-CTLA-4 scFv-Fc fragments, respectively). Additionally, a TGF-β receptor decoy can be replaced by other TGF-beta polypeptide antagonists, that can bind and remove TGF-β from the tumor microenvironment, including, for example, anti-TGF-beta antibodies or antibody fragments, anti-TGF-beta receptor antibodies or antibody fragments, and soluble TGF-beta antagonist polypeptides.

[0788] The following table lists exemplary products that can be encoded in plasmids in the immunostimulatory bacteria, and some effects/characteristics of such products.

| Encoded Product | Effects/Characteristics |
|---|---|
| Engineered | Chemokine gradients recruit T-cells. |
| STING - to | Induction of Type I IFN, T-cell activation. APC tumor antigen cross- |
| increase Type I | presentation. |
| IFN expression | Constitutive STING variants validated in SAVI patients with Type I |
| | Interferonopathies. |
| IL-12 | Strong Th1 immune response driver. |
| | Produced by activated APCs, particularly M1 Macrophages and |
| | DCs* |
| | Data indicate that it is a strong driver of IFN-γ |
| IL-15 and/or IL-15 | Stimulates T-cell and NK cell proliferation. |
| complex (IL- | Lacks T_{reg} stimulation seen with IL-2. |
| 15Rα-IL-15sc) | |
| IL-21 | Pleiotropic cytokine that stimulates T-cells and NK cells. |
| | Converts M2 macrophages to M1 macrophages. |
| | Produced upon TLR3 activation (RNA viral sensing). |
| IL-36γ | Promotes Th1 APCs and IFN-γ production by T-cells, NK cells and |
| | γδT-cells. |
| Modified 4-1BBL | Provides T-cell co-stimulation, improves cytotoxicity and memory |
| | phenotype of T-cells; modified with deletion or truncation of the |
| | cytoplasmic domain, and addition of extra positive residues to the N- |
| | terminal truncated cytoplasmic domain. |
| Anti-CTLA-4 | Enhances T-cell priming and activation against weaker tumor |
| scFV-Fc | antigens. |
| TGF-β Decoy | Binds and removes TGF-beta, relieves immunosuppression of T- |
| Receptor Trap | cells and Th1 APCs. |

*DC = Dendritic Cells

[0789] In any of the complementary combinations above, a TGF-β decoy receptor can be replaced with a TGF-β antagonizing polypeptide. As discussed above, TGF-β decoy receptors are any that act as decoys for binding TGF-β to remove it, or are TGF-β antagonizing polypeptides (e.g., anti-TGF-beta antibodies or antibody fragments, and anti-TGF-beta receptor antibodies or antibody fragments). The STING protein, or other DNA/RNA sensor that induces or activates type I IFN production, can be a GOF/constitutively active variant, or can be the wild-type protein, including the modified STING polypeptides and chimeric STING polypeptides described and provided herein. Any of the complementary combinations above also can be administered in combination with any one or more of: an anti-PD-1 antibody, an anti-CTLA-4 antibody, an anti-PD-L1 antibody, an anti-IL-6 antibody, an anti-Siglec-15 antibody, an anti-VEGF antibody, an anti-CD73 antibody, an anti-CD38 antibody, an anti-EGFR antibody, an anti-Her2 antibody, an anti-Mesothelin antibody, an anti-BCMA antibody, and antibody fragments thereof, as well as PARP inhibitors, HDAC inhibitors, or chemotherapy, and combinations thereof.

[0790] The plasmids and immunostimulatory bacteria provided herein encode combinations of therapeutic payloads. These include combinations of nucleic acid encoding any or all of the products listed in the table above. Combinations of complementary payloads were assessed, and exemplary combinations and their effects are described in the Examples. The effects of various combinations of payloads on the activation of antigen-specific T-cells, and on the secretion of CXCL10 by myeloid cells, a key chemokine involved in the recruitment of anti-tumor T-cells, were assessed. For example, combinations of the payloads can induce a strong secretion of CXCL10 by bone marrow dendritic cells (BMDCs). Combining IL-36γ with IL-12p70 and STING R284G tazCTT led to higher secretion of CXCL10 and IFN-γ by BMDCs (see, Example 26). Many of the combinations induce the activation of CD8⁺ T-cell responses (e.g., 4-1BB expression), and the secretion of IFN-γ. The results in the working Examples (see, Example 26) show that particular cytokine combinations can activate T-cells. For example, the combinations of IL-12p70+IL-15; IL-12p70+IL-15+IFN-α2; IL-12p70+IL-15+anti-4-1BB agonistic antibody; IL-12p70+IL-15+IL-36γ; IL-12p70+IL-15+IL-21; IL-12p70+IL-21+IL-36γ; IL-12p70+IL-36γ+IFN-α2; IL-12p70+IL-36γ+anti-4-1BB agonistic antibody; IL-15+IL-36γ+IFN-α2; and IL-15+IL-36γ+anti-4-1BB agonistic antibody, result in the secretion of high levels of IFN-γ, but relatively low levels of IL-6, from T-cells, making them ideal combinations for optimal T-cell activation, for the induction of anti-tumor immunity in the tumor microenvironment.

[0791] Additionally, several combinations of cytokines (IL-12p70, IL-15, IL-21, and IL-36γ) and 4-1BB engagement, activate T-cells to secrete high levels of IFN-γ, with and without TCR stimulation by an anti-CD3c agonistic antibody, for CD4⁺ and CD8⁺ T-cells. STING variants described herein as well as IL-12 can increase antigen specific activation of human CD8⁺ T-cells. Data (see, Example 24) also showed, in a mouse (mu) model of colorectal carcinoma, that immunostimulatory bacterial strains, expressing IL-15, or the combination of 4-1BBLΔcyt+IL-12 more potently inhibit tumor growth inhibition that the same strains expressing 4-1BBL(Δcyt) or IL-12 alone, and result in a high complete response rate (50% cure rate). Other combinations also were tested and shown to have potent anti-tumor activity in vivo.

[0792] Combinations of payloads can include a co-stimulatory molecule, such as an OX40L polypeptide, or a 4-1BBL polypeptide, or one of the cytoplasmic deleted or truncated variants thereof, and/or the modified forms thereof described and exemplified herein; or an anti-immune checkpoint antibody or fragment thereof, such as an anti-CTLA-4 scFv-Fc or an anti-CTLA-4 scFv (see, Example 20 and SEQ ID NOs:402 and 403, respectively); one or more cytokines/chemokines, such as IL-12, IL-15, IL-18, IL-21, IL-23, IL-36γ, IFN-α2, and CXCL10; TGF-β binding decoy receptors and other TGF-beta polypeptide antagonists, such as, for example, a human soluble TGFβ receptor II fused with a human IgG1 Fc (hu sTGFβRII-Fc; SEQ ID NO:407), anti-TGF-beta antibodies or antibody fragments, anti-TGF-beta receptor antibodies or antibody fragments, and soluble TGF-beta antagonist polypeptides; and one or more of a STING protein or a modified and/or chimeric STING protein, as described and exemplified herein.

[0793] Payloads/products/polypeptides can be encoded as a polycistronic construct, under the control of a single promoter (i.e., a single promoter system) and, as required, other regulatory sequences, and also can include 2A polypeptides or other such polypeptides that result in the translation of individual products. The payloads also can be expressed on plasmids containing two separate open reading frames (ORFs), each under the control of a different promoter (i.e., a dual promoter system). Exemplary combinations of payloads, in the order they are encoded on a plasmid, and including the 2A peptide that is encoded in the polycistronic construct, are set forth in the following table.

Exemplary Combinations of Products and Exemplary Order on the Plasmids

| 1^{st} Encoded | 1^{st} 2A | 2^{nd} Encoded | 2^{nd} 2A | 3^{rd} Encoded | 3^{rd} 2A | 4^{th} Encoded |
|---|---|---|---|---|---|---|
| Product | Peptide | Product | Peptide | Product | Peptide | Product |
| 4-1BBL* | T2A | IL-12p70 | | | | |
| 4-1BBL* | T2A | Chimeric | | | | |
| | | STING** | | | | |
| 4-1BBL* | T2A | IL-12p70 | P2A | Chimeric | | |
| | | | | STING** | | |
| IL-12p70 | T2A | Chimeric | | | | |
| | | STING** | | | | |
| IL-12p70 | T2A | IL-15 | | | | |
| IL-12p70 | T2A | IL-21 | | | | |
| IL-12p70 | T2A | IL-15 | | | | |
| IL-12p70 | T2A | IL-21 | | | | |
| IL-21 | T2A | IL-12p70 | | | | |
| IL-12p70 | T2A | IL-36γ | | | | |
| IL-36γ | T2A | IL-12p70 | | | | |
| 4-1BBL* | T2A | IL-12p70 | P2A | IL-15 | | |
| 4-1BBL* | T2A | IL-12p70 | P2A | IL-21 | | |
| 4-1BBL* | T2A | IL-12p70 | P2A | IL-36γ | | |
| 4-1BBL* | T2A | IL-12p70 | P2A | IL-15 | T2A | Chimeric |
| | | | | | | STING** |
| 4-1BBL* | T2A | IL-12p70 | P2A | IL-21 | T2A | Chimeric |
| | | | | | | STING** |
| 4-1BBL* | T2A | IL-12p70 | P2A | IL-36γ | T2A | Chimeric |
| | | | | | | STING** |
| IL-12p70 | T2A | IL-21 | P2A | Chimeric | | |
| | | | | STING** | | |
| IL-21 | T2A | IL-12p70 | P2A | Chimeric | | |
| | | | | STING** | | |
| IL-12p70 | T2A | IL-15 | P2A | Chimeric | | |
| | | | | STING** | | |
| IL-12p70 | T2A | IL-36γ | P2A | Chimeric | | |
| | | | | STING** | | |
| IL-36γ | T2A | IL-12p70 | P2A | Chimeric | | |
| | | | | STING** | | |
| Anti-CTLA-4 | T2A | IL-12p70 | | | | |
| scFv-Fc | | | | | | |
| Anti-CTLA-4 | T2A | IL-12p70 | P2A | Chimeric | | |
| scFv-Fc | | | | STING** | | |
| Anti-CTLA-4 | T2A | IL-12p70 | P2A | IL-15 | T2A | |
| scFv-Fc | | | | | | |
| Anti-CTLA-4 | T2A | IL-12p70 | P2A | IL-21 | T2A | |
| scFv-Fc | | | | | | |
| Anti-CTLA-4 | T2A | IL-12p70 | P2A | IL-36γ | T2A | |
| scFv-Fc | | | | | | |
| 4-1BBL* | T2A | sTGFβRIIFc^{#} | | | T2A | |
| sTGFβRIIFc^{#} | T2A | IL-12p70 | P2A | Chimeric | | |
| | | | | STING** | | |
| 4-1BBL* | T2A | sTGFβRIIFc^{#} | P2A | IL-12p70 | T2A | |
| 4-1BBL* | T2A | IL-12p70 | P2A | sTGFβRIIFc^{#} | T2A | |
| IL-36γ | T2A | IL-23 | P2A | OX40L | | |

*4-1BBL = the modified 4-1BBL with the cytoplasmic truncation and residue modifications to render the remaining cytoplasmic domain more positive to retain correct orientation with respect to the cell membrane.
**Chimeric STING = STING with the Tasmanian Devil CTT and the replacements R284G/N154S.
sTGFpRIIFc^{#} = type II receptor betaglycan.

[0794] Other combinations of products are contemplated (see discussions above and Examples). Other such combinations of interest include any of the modified STING proteins and a cytokine, such as a chimeric STING protein, such as the human STING chimera with the Tasmanian devil CTT, and particularly, with one or more gain-of-function mutations, such as N154S/R284G. The complementary combinations discussed herein can provide synergistic results. For example, the combination of the chimeric STING polypeptide and IL-15/IL-15R alpha chain complex (IL-15Rα-IL-15sc), shown in the Examples, acts synergistically to improve anti-tumor effectiveness.

[0795] The properties of the immunostimulatory bacteria provided herein, such as the accumulation in tumor-resident myeloid cells, and in the TME, and the combinations of products/payloads that can be expressed, can be selected to cover the cancer immunity cycle. Each step in the cycle, and the role of the immunostimulatory bacteria and payloads is summarized as follows:

[0796] 1) Release of cancer cell antigens—the immunostimulatory bacteria accumulate in the tumor-resident myeloid cells;

[0797] 2) Cancer antigen presentation—the immunostimulatory bacteria provided herein encode and express immune stimulators, such as the STING polypeptides and variants thereof, and IL-12, leading to the expression of type I interferons, including IFN-α and IFN-β;

[0798] 3) Priming and activation—the immunostimulatory bacteria encode the STING polypeptides and variants thereof, and the co-stimulatory proteins, such as 4-1BBL, and IL-12;

[0799] 4) Trafficking of the T-cells to the tumor—the encoded STING variants are expressed, leading to the consequent expression of IFN-α and IFN-β;

[0800] 5) Infiltration of T-cells into the tumor—vascular leakage and repolarization of immunosuppressive myeloid cells;

[0801] 6) Cancer cell recognition by T-cells—Type I IFN, and IFNγ, and upregulation of MEW; and

[0802] 7) Killing of cancer cells—the combination of encoded cytokines/chemokines, such as IL-12, IL-15, IL-21, and/or IL-36γ, which induce T-cell proliferation and release of IFN-γ, and the expression of a soluble TGF-β decoy receptor.

[0803] A skilled person, based on the disclosure herein and their knowledge, can identify other product payload combinations and other orders of the products as encoded on a polycistronic construct, that have immune-activating and/or immune suppressing effects, to enhance the anti-tumor activities of the immunostimulatory bacteria provided herein.

### E. Constructing Exemplary Plasmids Encoding Therapeutic Products for Bacterial Delivery

[0804] The immunostimulatory bacteria herein can be modified to encode one or more therapeutic products, including immunomodulatory proteins, that promote, or induce, or enhance an anti-tumor response. The therapeutic product can be encoded on a plasmid in the bacterium, under the control of a eukaryotic promoter, such as a promoter recognized by RNA polymerase II, for expression in a eukaryotic subject, particularly the subject for whom the immunostimulatory bacterium is to be administered, such as a human. The nucleic acid encoding the therapeutic product(s) can include, in addition to the eukaryotic promoter, other regulatory signals for expression or trafficking in the cells, such as for secretion or expression on the surface of a cell. Immunostimulatory proteins are those that, in the appropriate environment, such as a tumor microenvironment (TME), can promote, or participate in, or enhance an anti-tumor response in the subject to whom the immunostimulatory bacterium is administered. Immunostimulatory proteins include, but are not limited to, cytokines, chemokines, and co-stimulatory molecules. These include cytokines, such as, but not limited to, IL-2, IL-7, IL-12, IL-12p70 (IL-12p40+IL-12p35), IL-15, IL-15/IL-15Rα chain complex (IL-15Rα-IL-15sc), IL-18, IL-21, IL-23, IL-36γ, IL-2 that has attenuated binding to IL-2Ra, IL-2 that is modified so that it does not bind to IL-2Ra, IFN-α, and IFN-β; chemokines, such as, but not limited to, CCL3, CCL4, CCL5, CXCL9, CXCL10, and CXCL11; proteins that are involved in, or that effect or potentiate the recruitment and/or persistence of T-cells; and/or co-stimulatory molecules, such as, but not limited to, CD40, CD40L, OX40, OX40L, 4-1BB, 4-1BBL, 4-1BBL with a deletion of the cytoplasmic domain (4-1BBLΔcyt), 4-1BBL with a truncated cytoplasmic domain or otherwise modified truncated cytoplasmic domain, ICOS, ICOS ligand, CD27, CD27 ligand, CD80, CD86, members of the TNF/TNFR superfamily, and members of the B7-CD28 family. Other such immunostimulatory proteins that are used for treatment of tumors or that can promote, enhance, or otherwise increase or evoke an anti-tumor response, known to those of skill in the art, are contemplated for encoding in the immunostimulatory bacteria provided herein.

[0805] Other therapeutic products, encoded by the immunostimulatory bacteria herein, include cytosolic DNA/RNA sensors that induce or activate type I interferon production, including STING, MDA5, RIG-I, IRF3, and IRF7, as well as gain-of-function and constitutively active variants thereof. For example, the constitutively active STING variants include those with the mutations V147L, N154S, V155M, C206Y, R281Q, and/or R284G, such as N154S/R284G, and others described herein and known in the art, while the constitutively active IRF3 variants include those with the mutations S396D, S398D, S402D, T404D, and/or S405D, and others described herein and known in the art. Other therapeutic products, encoded by the immunostimulatory bacteria herein, include antibodies and antibody fragments, including single-chain fragment variables (scFvs), Fab fragments, Fab′ fragments, F(ab′)₂ fragments, Fv fragments, disulfide-linked Fvs (dsFvs), Fd fragments, Fd′ fragments, single-chain Fabs (scFabs), diabodies, anti-idiotypic (anti-Id) antibodies, synthetic antibodies, recombinantly produced antibodies, multi-specific antibodies (e.g., bi-specific antibodies), human antibodies, non-human antibodies, humanized antibodies, chimeric antibodies, and intrabodies, or antigen-binding fragments of any of the above. The antibodies can be directed against immune checkpoints, such as PD-1, PD-L1, CTLA-4, IDO 1 and 2, CTNNB1 (β-catenin), SIRPα, VISTA, and TREX-1, and others known in the art or described herein, or can be directed against other targets, such as TGF-β, VEGF, HER2, EGFR, STAT3, and IL-6, and other such targets whose inhibition improves the anti-tumor response. The immunostimulatory bacteria also can encode RNAi, such as siRNA (shRNA and miRNA) against immune checkpoints, such as TREX1, and other targets whose inhibition, suppression, or disruption improves the anti-tumor response.

[0806] In some embodiments, the immunostimulatory bacteria herein are engineered to encode and express one or more cytokines to stimulate the immune system, including, but not limited to, IL-2, IL-7, IL-12 (IL-12p70 (IL-12p40+IL-12p35)), IL-15 (and the IL-15:IL-15R alpha chain complex (IL-15/IL-Ra, or IL-15Rα-IL-15sc)), IL-18, IL-21, IL-23, IL-36 gamma, IFN-alpha, and IFN-beta. Cytokines stimulate immune effector cells and stromal cells at the tumor site, and enhance tumor cell recognition by cytotoxic cells. In some embodiments, the immunostimulatory bacteria can be engineered to encode chemokines, such as, for example, one or more of CCL3, CCL4, CCL5, CXCL9, CXCL10, and CXCL11. Complementary combinations of any of the therapeutic products can be encoded and delivered to the tumor microenvironment, to enhance the anti-tumor efficacy of the immunostimulatory bacteria. These modifications, and the immunostimulatory bacteria encoding them, are discussed above, and are exemplified below.

[0807] 1. Constitutive Promoters for Heterologous Expression of Proteins

[0808] Plasmids provided herein are designed to encode a therapeutic product, such as an immunostimulatory protein, that, when expressed in a mammalian subject, confers or contributes to anti-tumor immunity in the tumor microenvironment; the immunostimulatory protein or other therapeutic product is encoded on a plasmid in the bacterium under control of a eukaryotic promoter, such as a promoter that is recognized by RNA polymerase II (RNAP II). Generally, the promoter is a constitutive promoter, such as a late eukaryotic virus promoter. Exemplary promoters include, but are not limited to, a cytomegalovirus (CMV) promoter, an elongation factor-1 alpha (EF-1α) promoter, a ubiquitin C (UBC) promoter, a simian virus 40 (SV40) early promoter, a phosphoglycerate kinase 1 (PGK) promoter, a chicken β-actin (CBA) promoter and its derivative promoters CAGG or CAG, a β-glucuronidase (GUSB) promoter, the MND promoter (a synthetic promoter that contains the U3 region of a modified MoMuLV (Moloney murine leukemia virus) LTR with myeloproliferative sarcoma virus enhancer and deleted negative control region), a eukaryotic initiation factor 4A-I (EIF4A1) promoter, a CD68 promoter, and a GAPDH promoter, among others (see, e.g., Powell et al. (2015) Discov. Med. 19(102):49-57). The CAG promoter consists of: (C) the cytomegalovirus (CMV) early enhancer element; (A) the promoter, the first exon, and the first intron of chicken beta-actin gene; and (G) the splice acceptor of the rabbit beta-globin gene. MND is a synthetic promoter that contains the U3 region of a modified MoMuLV (Moloney murine leukemia virus) LTR with myeloproliferative sarcoma virus enhancer and deleted negative control region (murine leukemia virus-derived MND promoter (myeloproliferative sarcoma virus enhancer, negative control region deleted, d1587rev primer-binding site substituted); see, e.g., Li et al. (2010) J. Neurosci. Methods 189:56-64).

[0809] Two or more of these promoters can be encoded in multiple open reading frames (ORFs) on the plasmid. Certain promoters, including, but not limited to, CMV, contain multiple cAMP response element binding protein (CREB) sites. When plasmids containing these elements are released to the cytosol, for example those contained within S. typhimurium that are released into the cytosol following bacterial destruction, they can be efficiently shuttled to the nucleus using the CREB-mediated host microtubule machinery (see, e.g., Bai et al. (2017) Biosci. Rep. 37(6):BSR20160616).

[0810] The plasmids can include multiple promoters, including bacterial promoters, such as for expression of asd, and eukaryotic promoters for expression of therapeutic products. Various configurations of the promoters and other regulatory sequences have been assessed to improve expression of therapeutic products, and to improve bacterial growth and fitness. As shown in the examples below (see, Example 30), among the configurations tested, reversing the orientation of the eukaryotic expression cassette on the plasmid, and inclusion of one or more bacterial terminators, can increase the efficiency of encoded payload expression, and can improve bacterial fitness.

[0811] 2. Multiple Therapeutic Product Expression Cassettes

[0812] a. Single Promoter Constructs

[0813] Expression of multiple genes in the same cell from a single construct can be achieved, and is advantageous when the co-expression of several proteins is required to elicit a desired biological effect, such as an anti-tumor response. Internal ribosome entry site (IRES) sequences have been used to separate two coding sequences under control of a single promoter, however, the expression level of the second protein can be reduced compared to the first protein, and the length of the IRES sequence can be prohibitive in certain cases, such as when using viruses with small packaging capacities. The discovery of short (˜18-22 amino acid long), virus-derived peptide sequences, known as 2A peptides, that mediate a ribosome-skipping event, enables the generation of multiple separate peptide products, at similar levels, from a single mRNA. The 2A peptide coding sequence is included between the polypeptide-encoding transgenes (see, e.g., Daniels et al. (2014) PLoS One 9(6):e100637).

[0814] IRES elements and 2A peptides use different mechanisms for co-expression of multiple genes in one transcript. For example, when using an IRES element to express multiple genes in one mRNA, the gene directly downstream of the promoter is translated by the canonical cap-dependent mechanism, and those downstream of the IRES element are translated by a cap-independent mechanism, which has a lower translation efficiency than the cap-dependent mechanism, resulting in unbalanced expression, with lower expression of the IRES-driven gene (see, e.g., Chng et al. (2015) mAbs 7(2):403-412). 2A linked genes, on the other hand, are translated in one open reading frame (ORF). The cleavage of proteins separated by a 2A sequence occurs co-translationally, in an unconventional process, where a peptide bond often fails to form (i.e., the peptide bond is “skipped”) between the C-terminal glycine and proline in the 2A peptide. Despite this, translation proceeds, and two distinct proteins are produced in equal amounts. A short stretch, coding for approximately 20 amino acids, of the 2A peptide sequence, is sufficient to cause the bond-skipping. If the bond skipping does not occur, however, a fusion protein is generated that will not subsequently cleave (see, e.g., Daniels et al. (2014) PLoS One 9(6):e100637).

[0815] Many of these 2A peptides have been described, including, but not limited to, T2A (see, e.g., SEQ ID NO:327) from Thosea asigna virus, P2A (see, e.g., SEQ ID NO:328) from porcine teschovirus-1, E2A (see, e.g., SEQ ID NO:329) from equine rhinitis A virus, and F2A (see, e.g., SEQ ID NO:330) from foot-and-mouth disease virus, among others. Different studies have reported conflicting cleavage efficiencies of the various 2A peptides, and the cleavage efficiency of a 2A peptide can be affected by the nature of the protein expressed, the order of genes flanking the 2A sequence, the length of the 2A peptide used, and the linker between the upstream protein and 2A peptide. Cleavage efficiency and enhanced protein expression can often be improved through the use of upstream viral cleavage sequences, such as, but not limited to, the peptide furin cleavage sequence, RRKR, as well as by inserting GSG and SGS peptide linkers, a V5 epitope tag (GKPUPNPLLGLDST), or a 3×Flag epitope tag immediately preceding the 2A peptide (see, e.g., Chng et al. (2015) mAbs 7(2):403-412).

[0816] The immunostimulatory bacteria herein, containing plasmids encoding therapeutic products, such as immunomodulatory proteins, with a single promoter and ORF, can express two or more proteins through the use of viral internal ribosomal entry sites (IRES), which are cap-independent, or through translational read-through of 2A peptides, and subsequent self-cleavage into equally expressed co-proteins. The plasmids can contain other regulatory elements, as discussed below and elsewhere herein. For example, an exemplary construct (see, Example 14) is CMV-muIL-2 CO_T2A_muIFN-α2-WPRE, where codon optimized murine IL-2 is co-expressed with murine IFN-α2, using a CMV promoter, and a T2A peptide. Additionally, a Woodchuck Hepatitis Virus (WHP) Posttranscriptional Regulatory Element (WPRE) is included, to enhance expression. If, for example, a third therapeutic product is to be expressed by the plasmid, a 2A sequence is flanked by the first two proteins, which are expressed under the control of a first promoter, e.g., CMV, and a third protein is encoded under the control of a second promoter, e.g., EF-1α. Exemplary of such a construct is CMV-muIL-15Rα/IL-15sc_T2A_muSTING-R283G+EF-1α-muIL-18-WPRE, where murine 15Ra/IL-15sc, and murine STING with the replacement R283G, are co-expressed under control of a CMV promoter, using T2A, and murine IL-18 is expressed separately under control of an EF-1α promoter. This exemplary construct also includes a WPRE for enhanced expression.

[0817] b. Dual/Multiple Promoter Constructs

[0818] Alternatively, the genetic payloads/therapeutic products can be expressed using dual or multiple promoter constructs, where each protein is expressed under the control of a separate promoter. Thus, plasmids encoding therapeutic products, such as immunomodulatory proteins, expressed in combinations, can contain multiple promoters, each controlling an individual intact ORF with proper stop codon processing (i.e., dual/multiple promoter constructs); or multiple proteins can be expressed in a single ORF through the use of 2A peptides (i.e., single promoter constructs); or the plasmid can contain a mixture of single and dual/multiple promoter constructs, to express three or more proteins, as described above.

[0819] 3. Regulatory Elements

[0820] a. Post-Transcriptional Regulatory Elements

[0821] In order to enhance expression of single and multiple therapeutic products/immunomodulatory proteins from a single plasmid, regulatory elements may be employed that enhance the transcription and translation of the protein(s) of interest. For example, the post-transcriptional regulatory element (PRE) of woodchuck hepatitis virus (WPRE), when inserted in the 3′ untranslated region of the ORF, can enhance expression levels several fold (see, e.g., Zufferey et al. (1999) J. Virol. 73(4):2886-2892). Similarly, other such elements, including, but not limited to, the Hepatitis B Virus PRE (HPRE), also can enhance expression. The combination of these can be used at the 3′ ends of multiple ORFs to improve expression of multiple proteins on a single plasmid.

[0822] The PREs WPRE and HPRE are hepadnaviral cis-acting RNA elements that can increase the accumulation of cytoplasmic mRNA by promoting mRNA exportation from the nucleus, and can enhance post-transcriptional processing and stability.

[0823] b. Polyadenylation Signal Sequences and Terminators

[0824] Other elements on the plasmid that can enhance protein expression include polyadenylation signal sequences and terminators. Polyadenylation is the post-transcriptional addition of a poly(A) tail to the 3′ end of an mRNA transcript, which is part of the process that produces mature mRNA for translation. Polyadenylation signal sequences are important for nuclear export, mRNA stability, and efficient translation. A terminator is a sequence that defines the end of a transcript, creating a free 3′ end, and initiates the release of the newly synthesized mRNA from the transcriptional machinery. The free 3′ end is then available for the addition of the poly(A) tail. Terminators are found downstream of the gene to be transcribed, and typically occur directly after any 3′ regulatory elements, such as the polyadenylation or poly(A) signal. Commonly used mammalian terminators in expression plasmids include the simian virus 40 (SV40), human growth hormone (hGH), bovine growth hormone (BGH or bGH), and rabbit beta-globin (rbGlob) polyA sequences, that include the sequence motif AAUAAA, and promote both polyadenylation and termination.

[0825] When placed at the 3′ end of the ORF, sequences such as the simian virus 40 poly A (SV40pA) or the bovine growth hormone poly A (bGHpA) signals, result in several-fold increased expression both in vitro and in vivo (see, e.g., Powell et al. (2015) Discov. Med. 19(102):49-57). These and other such elements can further enhance the expression and translation of multiple therapeutic products, including immunomodulatory proteins, expressed from a single plasmid.

[0826] c. Enhancers

[0827] Promoters and enhancers are found upstream of the multiple cloning site (MCS) in a plasmid, and cooperate to determine the rate of transcription. Enhancers are sequences that bind activator proteins, in order to loop the DNA, and bring a specific promoter to the initiation complex, thus increasing the rate of transcription. They can be adjacent to, or far from the promoter they influence, and include CMV, EF-1α, SV40, and synthetic enhancers, or the MND promoter, which is a synthetic promoter that contains the U3 region of a modified MoMuLV (Moloney murine leukemia virus) LTR with myeloproliferative sarcoma virus enhancer. The immunostimulatory bacteria herein contain plasmids that can comprise enhancer(s) to enhance the expression of the therapeutic products/proteins encoded on the plasmids.

[0828] d. Secretion Signals

[0829] A secretion signal, also known as a signal sequence or peptide, a leader sequence or peptide, or a localization signal or sequence, is a short peptide at the N-terminus of a newly synthesized protein that is to be secreted. Signal peptides promote a cell to translocate a protein, usually to the cellular membrane. The efficiency of protein secretion is strongly determined by the signal peptide. Thus, the immunostimulatory bacteria herein contain plasmids that can comprise a signal peptide/secretion signal peptide, to facilitate and/or increase the expression or secretion of the encoded therapeutic product(s).

[0830] e. Improving Bacterial Fitness

[0831] The plasmids in the immunostimulatory bacteria that encode the therapeutic products, include genes and regulatory elements that are provided for expression of bacterial genes, and also for expression of complex polycistronic eukaryotic payloads. The switch between such evolutionarily divergent organisms introduces challenges for proper functioning in prokaryotes and eukaryotes. The bacteria are cultured in vitro, then administered to a eukaryotic subject, where the plasmids are delivered to cells, particularly to tumor-resident myeloid cells, in cancer subjects, where the payloads are expressed, processed and trafficked. As described in the Examples (see, Example 30), transcriptional leakiness from the eukaryotic promoter, such as the CMV promoter, in bacteria, combined with large eukaryotic genes and regulatory sequences, can result in reduced bacterial fitness that manifests as low injection stock viability, and reduced growth rate in broth culture.

[0832] As shown in the Examples (see, Example 30), to minimize the negative impacts to bacterial fitness, while maintaining high ectopic expression in mammalian cells, the delivery plasmid was systematically modified to improve bacterial fitness, and to maintain or improve eukaryotic expression. The possible exemplary negative impacts and solutions include, for example, the following:

[0833] 1) cryptic bacterial promoter sequences encoded within the CMV promoter enhancer region were identified using PromoterHunter (available online at phisite.org/promoterhunter/; see, e.g., Klucar et al. (2010) Nucleic Acids Res. 38(Database issue):D366-D370), and these putative promoter sequences were replaced with CREB-binding sites and partial CREB-binding sites to promote efficient plasmid delivery;

[0834] 2) to inhibit transcriptional leakiness from the CMV promoter, a number of bacterial terminators were inserted in the 5′ UTR of ORF 1, to inhibit expression in bacteria (see table in Example 30, below);

[0835] 3) to reduce the level of readthrough transcription from the origin of replication, the orientation of the expression cassette, from upstream of the CMV promoter to the end of the polyadenylation signal, was reversed, with and without a transcription terminator inserted between the expression cassette and the origin of replication; and

[0836] 4) modifications from among 1)-3) above, that resulted in increased injection stock viability, with enhanced in vitro genetic payload expression, were combined for further improvement.

[0837] The results, detailed in the Examples (see, Example 30), show that, when the expression cassette was reversed on the plasmid and the BBa_B0015 bacterial terminator was inserted after the coding region, and the T4 bacterial terminator was inserted downstream of the CMV promoter (see, e.g., FIG. 14), there was an increase in the bacterial cell viability, a reduced doubling time, growth to a higher stationary OD₆₀₀, and increased expression of the encoded payload in vitro, compared to the plasmid without the modifications.

[0838] The BBa_B0015 terminator is a composite terminator, in which a terminator derived from E. coli (BBa_B0010), and a terminator derived from the T7 phage (BBa_B0012), are joined.

[0839] Thus, provided herein are plasmids in which the eukaryotic promoter, such as a viral promoter, is in the opposite orientation from the bacterial promoter, such as the bacterial promoter controlling expression of the exogenous asd gene on the plasmid. For example, the exogenous asd cassette (includes the regulatory sequences for expression and the exogenous asd gene, encoded on the plasmid in the asd⁻ bacteria) is in the opposite orientation from the eukaryotic regulatory sequences and operatively linked payload-encoding nucleic acid. This reduces readthrough (leakiness) of the eukaryotic promoter. These constructs also include bacterial terminators flanking the payload expression cassette that includes the eukaryotic promoter, which reduces readthrough from bacterial promoters. FIG. 14, for example, provides an exemplary construct configuration.

[0840] Thus, bacterial fitness, if desired, can be improved by one or more of several strategies, including orienting expression cassettes including eukaryotic promoters in the opposite direction from those under the control of bacterial promoters, and the inclusion of bacterially-recognized terminators to terminate bacterial expression at strategic loci. Other such modifications can be included to enhance bacterial growth in vitro, and to favor expression, or to not interfere with expression, from eukaryotic promoters in vivo in the eukaryotic host, such as a human. Thus, the constructs were improved by the inclusion of bacterial promoters; and by reversing the orientation of the nucleic acid encoding the payload, relative to the exogenous asd-encoding cassette.

[0841] 4. Origin of Replication and Plasmid Copy Number

[0842] Plasmids are autonomously-replicating, extra-chromosomal, circular double-stranded DNA molecules that are maintained within bacteria by means of a replication origin. Copy number influences the plasmid stability. High copy number generally results in greater stability of the plasmid when the random partitioning occurs at cell division. A high copy number of plasmids generally decreases the growth rate, thus possibly allowing for bacterial cells with few plasmids to dominate the culture, since they grow faster. This can be ameliorated by using gene attenuation and gene dosing strategies, that limit the expression of certain genes on the plasmid that can be toxic to the bacteria when present in high copy numbers. The origin of replication also determines the plasmid's compatibility, i.e., its ability to replicate in conjunction with another plasmid within the same bacterial cell. Plasmids that utilize the same replication system cannot co-exist in the same bacterial cell; they are said to belong to the same compatibility group. The introduction of a new origin, in the form of a second plasmid from the same compatibility group, mimics the result of replication of the resident plasmid. Thus, any further replication is prevented until after the two plasmids have been segregated to different cells to create the correct pre-replication copy number.

[0843] Numerous bacterial origins of replication are known to those of skill in the art. The origin can be selected to achieve a desired copy number. Origins of replication contain sequences that are recognized as initiation sites of plasmid replication via DNA-dependent DNA polymerases (see, e.g., del Solar et al. (1998) Microbiol. Mol. Biol. Rev. 62(2):434-464). Different origins of replication provide for varying plasmid copy levels within each cell, and can range from one to hundreds of copies per cell. Commonly used bacterial plasmid origins of replication include, but are not limited to, pMB1 derived origins, which have very high copy derivatives, such as pUC, and lower copy derivatives, such as pBR322, as well as ColE1, p15A, and pSC101, and other origins, which have low copy numbers. Such origins are well-known to those of skill in the art. For example, the pUC19 origin results in copy numbers of 500-700 copies per cell. The pBR322 origin has a known copy number of 15-20 copies per cell. These origins only vary by a single base pair. The ColE1 origin copy number is 15-20, and derivatives, such as pBluescript, have copy numbers ranging from 300-500. The p15A origin that is in plasmid pACYC184, for example, results in a copy number of approximately 10. The pSC101 origins confer a copy number of approximately 5. Other low copy number vectors from which origins of replication can be obtained, include, for example, pWSK29, pWKS30, pWSK129, and pWKS130 (see, e.g., Wang et al. (1991) Gene 100:195-199). Medium to low copy number is less than 150, or less than 100. Low copy number is less than 20, 25, or 30. Generally, less than medium copy number is less than 150 copies, and less than low copy number is less than about 25 or less than 25 copies, and generally, copy number refers to the average copies of plasmid per bacterium in a preparation. Those of skill in the art can identify plasmids with low, medium, or high copy numbers. For example, one method to determine experimentally if the copy number is high or low is to perform a miniprep. A high-copy plasmid should yield between 3-5 μg DNA per 1 ml LB culture; a low-copy plasmid will yield between 0.2-1 μg DNA per ml of LB culture. Sequences of bacterial plasmids, including identification of and sequence of the origin of replication, are well known (see, e.g., snapgene.com/resources/plasmid_files/basic_cloning_vectors/pBR322/). Exemplary origins of replication, and their plasmid copy numbers, are summarized in the table below.

| Origin of Replication | Copy Number | SEQ ID NO. |
|---|---|---|
| pMB1 | Varies | 254 |
| p15A | 10-12 | 255 |
| pSC101 | ~5 | 256 |
| pBR322 | 15-20 | 243 |
| ColE1 | 15-20 | 257 |
| pPS10 | 15-20 | 258 |
| RK2 | ~5 | 259 |
| R6K (alpha origin) | 15-20 | 260 |
| R6K (beta origin) | 15-20 | 261 |
| R6K (gamma origin) | 15-20 | 262 |
| P1 (oriR) | Low | 263 |
| R1 | Low | 264 |
| pWSK | Low | 265 |
| ColE2 | 10-15 | 266 |
| pUC (pMB1) | 500-700 | 267 |
| F1 | 300-500 | 268 |

[0844] High copy plasmids are selected for heterologous expression of proteins in vitro, because the gene dosage is increased relative to chromosomal genes, there are higher specific yields of protein, and for therapeutic bacteria, higher therapeutic dosages of encoded therapeutics. It is shown, herein, however, that for delivery of plasmids encoding therapeutic products (e.g., immunomodulatory proteins), such as by S. typhimurium, in some embodiments, a high copy plasmid might be advantageous.

[0845] The requirement for bacteria to maintain the high copy plasmids can be a problem if the expressed molecule is toxic to the organism. The metabolic requirements for maintaining these plasmids can come at a cost of replicative fitness in vivo. Optimal plasmid copy number for delivery of therapeutic products can depend on the mechanism of attenuation of the strain engineered to deliver the plasmid. If needed, the skilled person, in view of the disclosure herein, can select an appropriate copy number for a particular immunostimulatory species and strain of bacteria.

[0846] 5. CpG Motifs and CpG Islands

[0847] Unmethylated cytidine-phosphate-guanosine (CpG) motifs are prevalent in bacterial, but not in vertebrate, genomic DNA. Pathogenic DNA and synthetic oligodeoxynucleotides (ODNs) containing CpG motifs activate host defense mechanisms, leading to innate and acquired immune responses. The unmethylated CpG motifs contain a central unmethylated CG dinucleotide plus flanking regions. In humans, four distinct classes of CpG ODNs have been identified, based on differences in structure, and in the nature of the immune response they induce. K-type ODNs (also referred to as B-type) contain from 1 to 5 CpG motifs, typically on a phosphorothioate backbone. D-type ODNs (also referred to as A-type) have a mixed phosphodiester/phosphorothioate backbone and have a single CpG motif, flanked by palindromic sequences that permit the formation of a stem-loop structure, as well as poly G motifs at the 3′ and 5′ ends. C-type ODNs have a phosphorothioate backbone, and contain multiple palindromic CpG motifs that can form stem loop structures or dimers. P-Class CpG ODNs have a phosphorothioate backbone, and contain multiple CpG motifs with double palindromes that can form hairpins at their GC-rich 3′ ends (see, e.g., Scheiermann et al. (2014) Vaccine 32(48):6377-6389). For purposes herein, the CpGs are encoded in the plasmid DNA; they can be introduced as a motif, or in a gene.

[0848] Toll-like receptors (TLRs) are key receptors for sensing pathogen-associated molecular patterns (PAMPs) and activating innate immunity against pathogens (see, e.g., Akira et al. (2001) Nat. Immunol. 2(8):675-680). TLR9 recognizes hypomethylated CpG motifs in the DNA of prokaryotes that do not occur naturally in mammalian DNA (see, e.g., McKelvey et al. (2011) J. Autoimmun. 36:76-86). Recognition of CpG motifs, upon phagocytosis of pathogens into endosomes in immune cell subsets, induces IRF7-dependent type I interferon signaling, and activates innate and adaptive immunity.

[0849] Immunostimulatory bacteria, such as Salmonella species, such as S. typhimurium strains, carrying plasmids containing CpG islands or motifs, are provided herein. These bacteria can activate TLR9, and induce type I IFN-mediated innate and adaptive immunity. As exemplified herein, bacterial plasmids that contain hypomethylated CpG islands can elicit innate and adaptive anti-tumor immune responses that, in combination with the therapeutic products encoded on the plasmid, such as immunostimulatory proteins and constitutively active variants of STING, IRF3, and other cytosolic DNA/RNA sensors, can have synergistic or enhanced anti-tumor activity. For example, the asd gene (see, e.g., SEQ ID NO:48) encodes a high frequency of hypomethylated CpG islands. CpG motifs can be included in combination with any of the therapeutic products, described or apparent from the description herein, in the immunostimulatory bacteria, to thereby enhance or improve anti-tumor immune responses in a treated subject.

[0850] Immunostimulatory CpGs can be included in the plasmids, by including a nucleic acid, typically from a bacterial gene, that encodes a gene product, and also, by adding a nucleic acid that encodes CpG motifs. The plasmids herein can include CpG motifs. Exemplary CpG motifs are known (see, e.g., U.S. Pat. Nos. 8,232,259, 8,426,375, and 8,241,844). These include, for example, synthetic immunostimulatory oligonucleotides, that are between 10 and 100, 10 and 20, 10 and 30, 10 and 40, 10 and 50, or 10 and 75, base pairs long, with the general formula: (CpG)n, where n is the number of repeats. Generally, at least one or two repeats are used; non-CG bases can be interspersed. Those of skill in the art are very familiar with the general use of CpG motifs for inducing an immune response by modulating TLRs, particularly TLR9.

[0851] 6. Plasmid Maintenance/Selection Components

[0852] The maintenance of plasmids in laboratory settings is usually ensured by the inclusion of an antibiotic resistance gene on the plasmid, and the use of antibiotics in the growth media. As described above, the use of an asd deletion mutant, complemented with a functional asd gene on the plasmid, allows for plasmid selection in vitro without the use of antibiotics, and allows for plasmid maintenance in vivo. The asd gene complementation system provides for such selection/maintenance (see, e.g., Galan et al. (1990) Gene 94(1):29-35). The use of the asd gene complementation system to maintain plasmids in the tumor microenvironment increases the potency of S. typhimurium and other immunostimulatory bacterial strains, engineered to deliver plasmids encoding therapeutic products, such as immunostimulatory proteins, constitutively active cytosolic DNA/RNA sensors, antibodies, antibody fragments, or other such products as discussed herein.

[0853] 7. DNA Nuclear Targeting Sequences

[0854] DNA nuclear targeting sequences (DTS), such as the SV40 DTS, mediate the translocation of DNA sequences through the nuclear pore complex. The mechanism of this transport is reported to be dependent on the binding of DNA binding proteins that contain nuclear localization sequences. The inclusion of a DTS on a plasmid to increase nuclear transport and expression has been demonstrated (see, e.g., Dean, D. A. et al. (1999) Exp. Cell Res. 253(2):713-722), and has been used to increase gene expression from plasmids delivered by S. typhimurium (see, e.g., Kong et al. (2012) Proc. Natl. Acad. Sci. U.S.A. 109(47):19414-19419).

[0855] Rho-independent or class I transcriptional terminators, such as the T1 terminator of the rrnB gene of E. coli, contain sequences of DNA that form secondary structures that cause dissociation of the transcription elongation complex. Transcriptional terminators are included in the plasmid in order to prevent expression of heterologous proteins by the S. typhimurium transcriptional machinery. This ensures that expression of the therapeutic products is confined to the host cell transcriptional machinery.

[0856] Plasmids used for transformation of Salmonella, such as S. typhimurium, as a cancer therapy described herein, contain all or some of the following attributes: 1) one or more constitutive promoters for heterologous expression of proteins; 2) one or more human immunomodulatory expression cassettes; 3) a bacterial origin of replication and optimized plasmid copy number; 4) immunostimulatory CpG islands; 5) an asd gene selectable marker for plasmid maintenance and selection; 6) DNA nuclear targeting sequences; and 7) transcriptional terminators.

### F. Pharmaceutical Production, Compositions, and Formulations

[0857] Provided herein are methods for manufacturing, and pharmaceutical compositions and formulations, containing any of the immunostimulatory bacteria provided herein and pharmaceutically acceptable excipients or additives. The pharmaceutical compositions can be used in the treatment of diseases, such as hyperproliferative diseases or conditions, such as a tumor or cancer. The immunostimulatory bacteria can be administered as a single agent therapy, or can be administered in a combination therapy with a further agent(s) or treatment(s). Combination therapy includes combining therapy with the immunostimulatory bacteria and/or other delivery vehicles provided herein, with any other anti-cancer therapy or treatment, including, but not limited to, immunotherapies, such as CAR-T therapy and checkpoint inhibitors, radiation, surgery, chemotherapeutic agents, such as nucleoside analogs and platinum compounds, and cellular therapies. The compositions can be formulated for single dosage administration, or for multiple dosage administration. The agents can be formulated for direct administration. The compositions can be provided as a liquid or dried formulation.

[0858] 1. Manufacturing

[0859] a. Cell Bank Manufacturing

[0860] As the active ingredient of the immunotherapeutic described herein is composed of engineered self-replicating bacteria, the selected composition will be expanded into a series of cell banks that will be maintained for long-term storage and as the starting material for manufacturing of the drug substance. Cell banks are produced under current good manufacturing practices (cGMP) in an appropriate manufacturing facility per the Code of Federal Regulations (CFR) 21 part 211, or other relevant regulatory authority. As the active agent of the immunotherapeutic is a live bacterium, the products described herein are, by definition, non-sterile and cannot be terminally sterilized. Care must be taken to ensure that aseptic procedures are used throughout the manufacturing process to prevent contamination. As such, all raw materials and solutions must be sterilized prior to use in the manufacturing process.

[0861] A master cell bank (MCB) is produced by sequential serial single colony isolation of the selected bacterial strain, to ensure no contaminants are present in the starting material. A sterile culture vessel containing sterile media (can be complex media, e.g., LB or MSB, or defined media, e.g., M9 supplemented with appropriate nutrients) is inoculated with a single well-isolated bacterial colony and the bacteria are allowed to replicate, e.g., by incubation at 37° C. with shaking. The bacteria are then prepared for cryopreservation by suspension in a solution containing a cryoprotective agent or agents.

[0862] Examples of cryoprotective agents include: proteins, such as human or bovine serum albumin, gelatin, and immunoglobulins; carbohydrates, including monosaccharides (e.g., galactose, D-mannose, sorbose, etc.) and their non-reducing derivatives (e.g., methylglucoside), disaccharides (e.g., trehalose, sucrose, and others), cyclodextrins, and polysaccharides (e.g., raffinose, maltodextrins, dextrans, etc.); amino-acids (e.g., glutamate, glycine, alanine, arginine or histidine, tryptophan, tyrosine, leucine, phenylalanine, etc.); methylamines, such as betaine; polyols, such as trihydric or higher sugar alcohols, e.g., glycerin, erythritol, glycerol, arabitol, xylitol, sorbitol, and mannitol; propylene glycol; polyethylene glycol; surfactants, e.g., Pluronic®; or organo-sulfur compounds, such as dimethyl sulfoxide (DMSO), and combinations thereof. Cryopreservation solutions can include one or more cryoprotective agents in a solution that also can contain salts (e.g., sodium chloride, potassium chloride, magnesium sulfate), and/or buffering agents, such as sodium phosphate, tris(hydroxymethyl)aminomethane (TRIS), 4-(2-hydroxyethyl)-1-piperazineethanesulfonic acid (HEPES), and other such buffering agents known to those of skill in the art.

[0863] Suspension of the bacteria in cryopreservation solution can be achieved either by addition of a concentrated cryoprotective agent or agents to the culture material to achieve a final concentration that preserves viability of the bacteria during the freezing and thawing process (e.g., 0.5% to 20% final concentration of glycerol), or by harvesting the bacteria (e.g., by centrifugation) and suspending in a cryopreservative solution containing the appropriate final concentration of cryoprotective agent(s). The suspension of bacteria in cryopreservation solution is then filled into appropriate sterile vials (plastic or glass) with a container closure system that is capable of maintaining closure integrity under frozen conditions (e.g., butyl stoppers and crimp seals). The vials of master cell bank are then frozen (either slowly by means of a controlled rate freezer, or quickly by means of placing directly into a freezer). The MCB is then stored frozen at a temperature that preserves long-term viability (e.g., at or below −60° C.). Thawed master cell bank material is thoroughly characterized to ensure identity, purity, and activity per regulation by the appropriate authorities.

[0864] Working cell banks (WCBs) are produced much the same way as the master cell bank, but the starting material is derived from the MCB. MCB material can be directly transferred into a fermentation vessel containing sterile media and expanded as above. The bacteria are then suspended in a cryopreservation solution, filled into containers, sealed, and frozen at or below −20° C. Multiple WCBs can be produced from MCB material, and WCB material can be used to make additional cell banks (e.g., a manufacturer's working cell bank (MWCB)). WCBs are stored frozen, and are characterized to ensure identity, purity, and activity. WCB material is typically the starting material used in the production of the drug substance of biologics such as engineered bacteria.

[0865] b. Drug Substance Manufacturing

[0866] Drug substance is manufactured using aseptic processes under cGMP, as described above. Working cell bank material is typically used as starting material for manufacturing of drug substance under cGMP, however, other cell banks can be used (e.g., MCB or MWCB). Aseptic processing is used for production of all cell therapies, including bacterial cell-based therapies. The bacteria from the cell bank are expanded by fermentation; this can be achieved by production of a pre-culture (e.g., in a shake flask), or by direct inoculation of a fermenter. Fermentation is accomplished in a sterile bioreactor or flask that can be single-use disposable, or re-usable. Bacteria are harvested by concentration (e.g., by centrifugation, continuous centrifugation, or tangential flow filtration). Concentrated bacteria are purified from media components and bacterial metabolites by exchange of the media with buffer (e.g., by diafiltration). The bulk drug product is formulated and preserved as an intermediate (e.g., by freezing or drying), or is processed directly into a drug product. Drug substance is tested for identity, strength, purity, potency, and quality.

[0867] c. Drug Product Manufacturing

[0868] Drug product is defined as the final formulation of the active substance contained in its final container. Drug product is manufactured using aseptic processes under cGMP. Drug product is produced from drug substance. Drug substance is thawed or reconstituted if necessary, then formulated at the appropriate target strength. Because the active component of the drug product is live, engineered bacteria, the strength is determined by the number of colony forming units (CFUs) contained within the suspension. The bulk product is diluted in a final formulation appropriate for storage and use, as described below. Containers are filled and sealed with a container closure system, and the drug product is labeled. The drug product is stored at an appropriate temperature to preserve stability, and is tested for identity, strength, purity, potency, and quality, and released for human use if it meets specified acceptance criteria.

[0869] 2. Compositions

[0870] Pharmaceutically acceptable compositions are prepared in view of approvals for a regulatory agency or other agency, and/or prepared in accordance with generally recognized pharmacopeia for use in animals and in humans. The compositions can be prepared as solutions, suspensions, powders, or sustained release formulations. Typically, the compounds are formulated into pharmaceutical compositions using techniques and procedures well-known in the art (see, e.g., Ansel, Introduction to Pharmaceutical Dosage Forms, Fourth Edition, 1985, page 126). The formulation should suit the mode of administration.

[0871] Compositions can be formulated for administration by any route known to those of skill in the art, including intramuscular, intravenous, intradermal, intralesional, intraperitoneal, subcutaneous, intratumoral, epidural, nasal, oral, vaginal, rectal, topical, local, otic, inhalational, buccal (e.g., sublingual), and transdermal administration, or by any suitable route. Other modes of administration also are contemplated. Administration can be local, topical, or systemic, depending upon the locus of treatment. Local administration to an area in need of treatment can be achieved by, for example, but not limited to, local infusion during surgery, topical application, e.g., in conjunction with a wound dressing after surgery, by injection, by means of a catheter, by means of a suppository, or by means of an implant. Compositions also can be administered with other biologically active agents, either sequentially, intermittently, or in the same composition. Administration also can include controlled release systems, including controlled release formulations and device controlled release, such as by means of a pump.

[0872] The most suitable route in any given case depends on a variety of factors, such as the nature of the disease, the progress of the disease, the severity of the disease, and the particular composition which is used. Pharmaceutical compositions can be formulated in dosage forms appropriate for each route of administration. In particular, the compositions can be formulated into any suitable pharmaceutical preparations for systemic, local, intraperitoneal, oral, or direct administration. For example, the compositions can be formulated for administration subcutaneously, intramuscularly, intratumorally, intravenously, or intradermally. Administration methods can be employed to decrease the exposure of the active agent to degradative processes, such as immunological intervention via antigenic and immunogenic responses. Examples of such methods include local administration at the site of treatment, or continuous infusion.

[0873] The immunostimulatory bacteria can be formulated into suitable pharmaceutical preparations, such as solutions, suspensions, tablets, dispersible tablets, pills, capsules, powders, sustained release formulations, or elixirs, for oral administrations, as well as transdermal patch preparations, and dry powder inhalers. Typically, the compounds are formulated into pharmaceutical compositions using techniques and procedures well-known in the art (see, e.g., Ansel, Introduction to Pharmaceutical Dosage Forms, Fourth Edition, 1985, page 126). Generally, the mode of formulation is a function of the route of administration. The compositions can be formulated in dried (lyophilized or other forms of vitrification) or liquid form. Where the compositions are provided in dried form, they can be reconstituted just prior to use by addition of an appropriate buffer, for example, a sterile saline solution.

[0874] 3. Formulations

[0875] a. Liquids, Injectables, Emulsions

[0876] The formulation generally is made to suit the route of administration. Parenteral administration, generally characterized by injection or infusion, either subcutaneously, intramuscularly, intratumorally, intravenously, or intradermally, is contemplated herein. Preparations of bacteria for parenteral administration include suspensions ready for injection (direct administration), frozen suspensions that are thawed prior to use, dry soluble products, such as lyophilized powders, ready to be combined with a resuspension solution just prior to use, and emulsions. Dried thermostable formulations, such as lyophilized formulations, can be used for storage of unit doses for later use.

[0877] The pharmaceutical preparation can be in a frozen liquid form, for example, a suspension. If provided in frozen liquid form, the drug product can be provided as a concentrated preparation to be thawed and diluted to a therapeutically effective concentration before use.

[0878] The pharmaceutical preparations also can be provided in a dosage form that does not require thawing or dilution for use. Such liquid preparations can be prepared by conventional means with pharmaceutically acceptable additives, as appropriate, such as suspending agents (e.g., sorbitol, cellulose derivatives, or hydrogenated edible fats); emulsifying agents (e.g., lecithin or acacia); non-aqueous vehicles (e.g., almond oil, oily esters, or fractionated vegetable oils); and preservatives suitable for use with microbial therapeutics. The pharmaceutical preparations can be presented in dried form, such as lyophilized or spray-dried, for reconstitution with water or other sterile suitable vehicle before use.

[0879] Suitable excipients are, for example, water, saline, dextrose, or glycerol. The solutions can be either aqueous or non-aqueous. If administered intravenously, suitable carriers include physiological saline or phosphate buffered saline (PBS), and other buffered solutions used for intravenous hydration. For intratumoral administration, solutions containing thickening agents, such as glucose, polyethylene glycol, and polypropylene glycol, oil emulsions, and mixtures thereof, can be appropriate to maintain localization of the injectant.

[0880] Pharmaceutical compositions can include carriers or other excipients. For example, pharmaceutical compositions provided herein can contain any one or more of a diluents(s), adjuvant(s), antiadherent(s), binder(s), coating(s), filler(s), flavor(s), color(s), lubricant(s), glidant(s), preservative(s), detergent(s), or sorbent(s), and a combination thereof, or a vehicle with which a modified therapeutic bacteria is administered. For example, pharmaceutically acceptable carriers or excipients used in parenteral preparations include aqueous vehicles, non-aqueous vehicles, isotonic agents, buffers, antioxidants, local anesthetics, suspending and dispersing agents, emulsifying agents, sequestering or chelating agents, and other pharmaceutically acceptable substances. Formulations, including liquid preparations, can be prepared by conventional means with pharmaceutically acceptable additives or excipients.

[0881] Pharmaceutical compositions can include carriers, such as a diluent, adjuvant, excipient, or vehicle, with which the compositions are administered. Examples of suitable pharmaceutical carriers are described in “Remington's Pharmaceutical Sciences” by E. W. Martin. Such compositions will contain a therapeutically effective amount of the compound or agent, generally in purified form or partially purified form, together with a suitable amount of carrier, so as to provide the form for proper administration to the patient. Such pharmaceutical carriers can be sterile liquids, such as water and oils, including those of petroleum, animal, vegetable, or synthetic origin, such as peanut oil, soybean oil, mineral oil, and sesame oil. Water is a typical carrier. Saline solutions and aqueous dextrose and glycerol solutions also can be employed as liquid carriers, particularly for injectable solutions. Compositions can contain, along with an active ingredient: a diluent, such as lactose, sucrose, dicalcium phosphate, or carboxymethylcellulose; a lubricant, such as magnesium stearate, calcium stearate, and talc; and a binder, such as starch, natural gums, such as gum acacia, gelatin, glucose, molasses, polyvinylpyrrolidine, celluloses and derivatives thereof, povidone, crospovidone, and other such binders known to those of skill in the art. Suitable pharmaceutical excipients include starch, glucose, lactose, sucrose, gelatin, malt, rice, flour, chalk, silica gel, sodium stearate, glycerol monostearate, talc, sodium chloride, dried skim milk, glycerol, propylene, glycol, water, and ethanol. For example, suitable excipients are, for example, water, saline, dextrose, glycerol, or ethanol. A composition, if desired, also can contain other minor amounts of non-toxic auxiliary substances, such as wetting or emulsifying agents, pH buffering agents, stabilizers, solubility enhancers, and other such agents, such as, for example, sodium acetate, sorbitan monolaurate, triethanolamine oleate, and cyclodextrins.

[0882] Pharmaceutically acceptable carriers used in parenteral preparations include aqueous vehicles, non-aqueous vehicles, antimicrobial agents, isotonic agents, buffers, antioxidants, local anesthetics, suspending and dispersing agents, emulsifying agents, sequestering or chelating agents, and other pharmaceutically acceptable substances. Examples of aqueous vehicles include Sodium Chloride Injection, Ringer's Injection, Isotonic Dextrose Injection, Sterile Water Injection, and Dextrose and Lactated Ringer's Injection. Non-aqueous parenteral vehicles include fixed oils of vegetable origin, cottonseed oil, corn oil, sesame oil, and peanut oil. Isotonic agents include sodium chloride and dextrose. Buffers include phosphate and citrate. Antioxidants include sodium bisulfate. Local anesthetics include procaine hydrochloride. Suspending and dispersing agents include sodium carboxymethylcellulose, hydroxypropyl methylcellulose, and polyvinylpyrrolidone. Emulsifying agents include, for example, polysorbates, such Polysorbate 80 (TWEEN 80). Sequestering or chelating agents of metal ions, such as EDTA, can be included. Pharmaceutical carriers also include polyethylene glycol and propylene glycol, for water miscible vehicles, and sodium hydroxide, hydrochloric acid, citric acid, or lactic acid, for pH adjustment. Non-anti-microbial preservatives can be included.

[0883] The pharmaceutical compositions also can contain other minor amounts of non-toxic auxiliary substances, such as wetting or emulsifying agents, pH buffering agents, stabilizers, solubility enhancers, and other such agents, such as, for example, sodium acetate, sorbitan monolaurate, triethanolamine oleate, and cyclodextrins. Implantation of a slow-release or sustained-release system, such that a constant level of dosage is maintained (see, e.g., U.S. Pat. No. 3,710,795), also is contemplated herein. The percentage of active compound contained in such parenteral compositions is highly dependent on the specific nature thereof, as well as the activity of the compound and the needs of the subject.

[0884] b. Dried Thermostable Formulations

[0885] The bacteria can be dried. Dried thermostable formulations, such as lyophilized or spray dried powders and vitrified glass, can be reconstituted for administration as solutions, emulsions, and other mixtures. The dried thermostable formulations can be prepared from any of the liquid formulations, such as the suspensions, described above. The pharmaceutical preparations can be presented in lyophilized or vitrified form, for reconstitution with water or other suitable vehicle, before use.

[0886] The thermostable formulation is prepared for administration by reconstituting the dried compound with a sterile solution. The solution can contain an excipient which improves the stability or other pharmacological attribute of the active substance or reconstituted solution, prepared from the powder. The thermostable formulation is prepared by dissolving an excipient, such as dextrose, sorbitol, fructose, corn syrup, xylitol, glycerin, glucose, sucrose, or other suitable agent, in a suitable buffer, such as citrate, sodium or potassium phosphate, or other such buffer known to those of skill in the art. Then, the drug substance is added to the resulting mixture, and stirred until it is mixed. The resulting mixture is apportioned into vials for drying. Each vial will contain a single dosage, containing 1×10⁵ to 1×10¹¹ CFUs per vial. After drying, the product vial is sealed with a container closure system that prevents moisture or contaminants from entering the sealed vial. The dried product can be stored under appropriate conditions, such as at −20° C., 4° C., or room temperature. Reconstitution of this dried formulation with water or a buffer solution provides a formulation for use in parenteral administration. The precise amount depends upon the indication treated and selected compound. Such amount can be empirically determined.

[0887] 4. Compositions for Other Routes of Administration

[0888] Depending upon the condition treated, other routes of administration in addition to parenteral, such as topical application, transdermal patches, and oral and rectal administration, also are contemplated herein. The suspensions and powders described above can be administered orally, or can be reconstituted for oral administration. Pharmaceutical dosage forms for rectal administration are rectal suppositories, capsules, and tablets and gel capsules for systemic effect. Rectal suppositories include solid bodies for insertion into the rectum which melt or soften at body temperature, releasing one or more pharmacologically or therapeutically active ingredients. Pharmaceutically acceptable substances in rectal suppositories are bases or vehicles and agents to raise the melting point. Examples of bases include cocoa butter (theobroma oil), glycerin-gelatin, CARBOWAX™ (polyethylene glycol), and appropriate mixtures of mono-, di-, and triglycerides of fatty acids. Combinations of the various bases can be used. Agents to raise the melting point of suppositories include spermaceti and wax. Rectal suppositories can be prepared either by the compressed method, or by molding. The typical weight of a rectal suppository is about 2 to 3 grams. Tablets and capsules for rectal administration are manufactured using the same pharmaceutically acceptable substance and by the same methods as for formulations for oral administration. Formulations suitable for rectal administration can be provided as unit dose suppositories. These can be prepared by admixing the drug substance with one or more conventional solid carriers, for example, cocoa butter, and then shaping the resulting mixture.

[0889] For oral administration, pharmaceutical compositions can take the form of, for example, tablets or capsules prepared by conventional means with pharmaceutically acceptable excipients, such as binding agents (e.g., pregelatinized maize starch, polyvinyl pyrrolidone, or hydroxypropyl methylcellulose); fillers (e.g., lactose, microcrystalline cellulose, or calcium hydrogen phosphate); lubricants (e.g., magnesium stearate, talc, or silica); disintegrants (e.g., potato starch or sodium starch glycolate); or wetting agents (e.g., sodium lauryl sulfate). The tablets can be coated by methods well-known in the art.

[0890] Formulations suitable for buccal (sublingual) administration include, for example, lozenges containing the active compound in a flavored base, usually sucrose and acacia or tragacanth; and pastilles containing the compound in an inert base, such as gelatin and glycerin, or sucrose and acacia.

[0891] Topical mixtures are prepared as described for local and systemic administration. The resulting mixtures can be solutions, suspensions, emulsions, or the like, and are formulated as creams, gels, ointments, emulsions, solutions, elixirs, lotions, suspensions, tinctures, pastes, foams, aerosols, irrigations, sprays, suppositories, bandages, dermal patches, or any other formulations suitable for topical administration.

[0892] The compositions can be formulated as aerosols for topical application, such as by inhalation (see, e.g., U.S. Pat. Nos. 4,044,126, 4,414,209, and 4,364,923, which describe aerosols for the delivery of a steroid useful for treatment of lung diseases). These formulations, for administration to the respiratory tract, can be in the form of an aerosol or solution for a nebulizer, or as a microtine powder for insufflation, alone or in combination with an inert carrier such as lactose. In such a case, the particles of the formulation will typically have diameters of less than 50 microns, or less than 10 microns.

[0893] The compounds can be formulated for local or topical application, such as for topical application to the skin and mucous membranes, such as in the eye, in the form of gels, creams, and lotions, and for application to the eye, or for intracisternal or intraspinal application. Topical administration is contemplated for transdermal delivery, and also for administration to the eyes or mucosa, or for inhalation therapies. Nasal solutions of the active compound alone, or in combination with other pharmaceutically acceptable excipients, also can be administered.

[0894] Formulations suitable for transdermal administration are provided. They can be provided in any suitable format, such as discrete patches adapted to remain in intimate contact with the epidermis of the recipient for a prolonged period of time. Such patches contain the active compound in an optionally buffered aqueous solution of, for example, 0.1 to 0.2 M concentration, with respect to the active compound. Formulations suitable for transdermal administration also can be delivered by iontophoresis (see, e.g., Tyle, P. (1986) Pharmaceutical Research 3(6):318-326), and typically take the form of an optionally buffered aqueous solution of the active compound.

[0895] Pharmaceutical compositions also can be administered by controlled release formulations and/or delivery devices (see e.g., U.S. Pat. Nos. 3,536,809; 3,598,123; 3,630,200; 3,845,770; 3,916,899; 4,008,719; 4,769,027; 5,059,595; 5,073,543; 5,120,548; 5,591,767; 5,639,476; 5,674,533; and 5,733,566).

[0896] 5. Dosages and Administration

[0897] The compositions can be formulated as pharmaceutical compositions for single dosage or multiple dosage administration. The immunostimulatory bacteria can be included in an amount sufficient to exert a therapeutically useful effect in the absence of undesirable side effects on the patient treated. For example, the concentration of the pharmaceutically active compound is adjusted so that an injection provides an effective amount to produce the desired pharmacological effect. The therapeutically effective concentration can be determined empirically by testing the immunostimulatory bacteria in known in vitro and in vivo systems, such as by using the assays described herein or known in the art. For example, standard clinical techniques can be employed. In vitro assays and animal models can be employed to help identify optimal dosage ranges. The precise dose, which can be determined empirically, can depend on the age, weight, body surface area, and condition of the patient or animal, the particular immunostimulatory bacteria administered, the route of administration, the type of disease to be treated, and the seriousness of the disease.

[0898] Hence, it is understood that the precise dosage and duration of treatment is a function of the disease being treated, and can be determined empirically using known testing protocols, or by extrapolation from in vivo or in vitro test data. Concentrations and dosage values also can vary with the severity of the condition to be alleviated. It is to be further understood that, for any particular subject, specific dosage regimens should be adjusted over time according to the individual need and the professional judgment of the person administering or supervising the administration of the compositions, and that the concentration ranges set forth herein are exemplary only and are not intended to limit the scope or use of compositions and combinations containing them. The compositions can be administered hourly, daily, weekly, monthly, yearly, or once. Generally, dosage regimens are chosen to limit toxicity. It should be noted that the attending physician would know how to and when to terminate, interrupt, or adjust therapy to lower dosage due to toxicity, or bone marrow, liver, or kidney, or other tissue dysfunctions. Conversely, the attending physician would also know how to and when to adjust treatment to higher levels if the clinical response is not adequate (precluding toxic side effects).

[0899] The immunostimulatory bacteria are included in the composition in an amount sufficient to exert a therapeutically useful effect. For example, the amount is one that achieves a therapeutic effect in the treatment of a hyperproliferative disease or condition, such as cancer. An exemplary dose can be about 1×10⁹ CFU/m². As shown in the table below, and noted above, higher doses can be administered. The data below, from an experiment in a mouse model, show that strains with the genome modifications as described herein have significantly improved tolerability, at least about 15-fold, compared VNP20009, and, thus, can be dosed in higher amounts.

| | | | | Fold | Human |
|---|---|---|---|---|---|
| | | LD₅₀ in | Fold | Improved vs, | Equivalent |
| Strain Name | Strain Genotype | BALB/c Mice | Attenuated | VNP2009 | Dose (CFU/m²) |
| VNP20009 | ΔpurI + ΔmsbB | 4.4E6 | ~44,000 | — | 6.33E+08 |
| ΔFLG | ΔpurI + ΔmsbB + | 2.0E7 | 200,000 | 4.5 | 2.88E+09 |
| | ΔasdA + ΔFLG | | | | |
| ΔpagP | ΔpurI + ΔmsbB + | 1.4E7 | 139,000 | 3.2 | 2.00E+09 |
| | ΔasdA + ΔpagP | | | | |
| ΔFLG/ΔpagP | ΔpurI + ΔmsbB + | >6.2E7 | >620,000 | >14 | >8.91E+09 |
| | ΔasdA + ΔPLG + | | | | |
| | ΔpagP | | | | |

[0900] Pharmaceutically and therapeutically active compounds and derivatives thereof are typically formulated and administered in unit dosage forms or multiple dosage forms. Each unit dose contains a predetermined quantity of therapeutically active compound sufficient to produce the desired therapeutic effect, in association with the required pharmaceutical carrier, vehicle, or diluent. Unit dosage forms, include, but are not limited to, tablets, capsules, pills, powders, granules, parenteral suspensions, oral solutions or suspensions, and oil-in-water emulsions, containing suitable quantities of the compounds or pharmaceutically acceptable derivatives thereof. Unit dose forms can be contained in vials, ampoules and syringes, or individually packaged tablets or capsules. Unit dose forms can be administered in fractions or multiples thereof. A multiple dose form is a plurality of identical unit dosage forms packaged in a single container to be administered in segregated unit dose form. Examples of multiple dose forms include vials, bottles of tablets or capsules, or bottles of pints or gallons. Hence, multiple dose form is a multiple of unit doses that are not segregated in packaging. Generally, dosage forms or compositions containing active ingredient in the range of 0.005% to 100%, with the balance made up from non-toxic carrier, can be prepared. Pharmaceutical compositions can be formulated in dosage forms appropriate for each route of administration.

[0901] The unit-dose parenteral preparations are packaged in an ampoule, a vial, or a syringe with a needle. The volume of liquid solution or reconstituted powder preparation, containing the pharmaceutically active compound, is a function of the disease to be treated and the particular article of manufacture chosen for package. All preparations for parenteral administration must be sterile, as is known and practiced in the art.

[0902] As indicated, compositions provided herein can be formulated for any route known to those of skill in the art, including, but not limited to, subcutaneous, intramuscular, intravenous, intradermal, intralesional, intraperitoneal, epidural, vaginal, rectal, local, otic, or transdermal administration, or any route of administration. Formulations suited for such routes are known to one of skill in the art. Compositions also can be administered with other biologically active agents, either sequentially, intermittently, or in the same composition.

[0903] Pharmaceutical compositions can be administered by controlled release formulations and/or delivery devices (see, e.g., U.S. Pat. Nos. 3,536,809; 3,598,123; 3,630,200; 3,845,770; 3,847,770; 3,916,899; 4,008,719; 4,687,660; 4,769,027; 5,059,595; 5,073,543; 5,120,548; 5,354,556; 5,591,767; 5,639,476; 5,674,533; and 5,733,566). Various delivery systems are known and can be used to administer selected compositions, are contemplated for use herein, and such particles can be easily made.

[0904] 6. Packaging and Articles of Manufacture

[0905] Also provided are articles of manufacture containing packaging materials, any pharmaceutical composition provided herein, and a label that indicates that the compositions are to be used for treatment of diseases or conditions as described herein. For example, the label can indicate that the treatment is for a tumor or for cancer.

[0906] Combinations of immunostimulatory bacteria described herein and another therapeutic agent also can be packaged in an article of manufacture. In one example, the article of manufacture contains a pharmaceutical composition containing the immunostimulatory bacteria composition and no further agent or treatment. In other examples, the article of manufacture contains another further therapeutic agent, such as a different anti-cancer agent. In this example, the agents can be provided together or separately, for packaging as articles of manufacture.

[0907] The articles of manufacture provided herein contain packaging materials. Packaging materials for use in packaging pharmaceutical products are well-known to those of skill in the art. See, for example, U.S. Pat. Nos. 5,323,907, 5,052,558, and 5,033,252, each of which is incorporated herein in its entirety. Examples of pharmaceutical packaging materials include, but are not limited to, blister packs, bottles, tubes, inhalers, pumps, bags, vials, containers, syringes, bottles, and any packaging material suitable for a selected formulation and intended mode of administration and treatment. Exemplary of articles of manufacture are containers, including single chamber and dual chamber containers. The containers include, but are not limited to, tubes, bottles, and syringes. The containers can further include a needle for intravenous administration.

[0908] The choice of package depends on the agents, and whether such compositions will be packaged together or separately. In general, the packaging is non-reactive with the compositions contained therein. In other examples, some of the components can be packaged as a mixture. In other examples, all components are packaged separately. Thus, for example, the components can be packaged as separate compositions that, upon mixing just prior to administration, can be directly administered together. Alternatively, the components can be packaged as separate compositions for administration separately.

[0909] Selected compositions including articles of manufacture thereof also can be provided as kits. Kits can include a pharmaceutical composition described herein, and an item for administration provided as an article of manufacture. The compositions can be contained in the item for administration, or can be provided separately to be added later. The kit can, optionally, include instructions for application, including dosages, dosing regimens, and instructions for modes of administration. Kits also can include a pharmaceutical composition described herein and an item for diagnosis.

### G. Methods of Treatment and Uses

[0910] The methods provided herein include methods of administering or using the immunostimulatory bacteria, for treating subjects having a disease or condition whose symptoms can be ameliorated or lessened by administration of such bacteria, such as cancer. In particular examples, the disease or condition is a tumor or a cancer. Additionally, methods of combination therapies with one or more additional agents for treatment, such as an anti-cancer agent or an anti-hyaluronan agent, also are provided. The bacteria can be administered by any suitable route, including, but not limited to, parenteral, systemic, topical, and local, such as intra-tumoral, intravenous, rectal, oral, intramuscular, mucosal, and other routes. Because of the modifications of the bacteria described herein, problems associated with systemic administration are solved. Formulations suitable for each route of administration are provided. The skilled person can establish suitable regimens and doses, and can select routes of administration.

[0911] 1. Diagnostics for Patient Selection for Treatment and for Monitoring Treatment

[0912] a. Patient Selection

[0913] Biomarkers can be used to identify patients who are likely to respond to therapy with the immunostimulatory bacteria provided herein. For example, the Adenosine Signature and the Myeloid Signature can be assessed by NanoString gene expression panels, and T-cell infiltration of tumors can be assessed by the Immunoscore® test, which is an in vitro diagnostic test used for predicting the risk of relapse in early stage colon cancer patients, by measuring the host immune response at a tumor site. Patients whose tumors or body fluids indicate an immune responsiveness or an immune response are more likely to respond to the treatment with the immunostimulatory bacteria provided herein.

[0914] Other biomarkers include tumor-infiltrating lymphocytes (TILs), CD73, CD39, TNAP (tissue-nonspecific alkaline phosphatase), CD38, CD68, PD-L1, and FoxP3. For example, tumors that can be treated with the immunostimulatory bacteria provided herein are T-cell excluded, exhibit high levels of purines/adenosine, and are unresponsive to PD-1/PD-L1 targeted therapies.

[0915] Gene expression profiles (GEPs), which can be determined using various NanoString gene expression panels, can be analyzed, for example, to identify the “adenosine signature” of tumors. High concentrations of adenosine are found in certain tumors, including colorectal carcinoma (CRC), non-small cell lung cancer (NSCLC), and pancreatic cancer, among others. Patients with tumors that exhibit high concentrations of purines/adenosine are likely to respond to therapy, since the immunostimulatory bacteria herein accumulate and replicate in purine/adenosine rich tumor microenvironments. Thus, the identification of tumors that express an “Adenosine Signature” can be used to predict patient response to therapy. Additionally, the immunostimulatory bacteria herein preferentially accumulate in and infect tumor-resident myeloid cells. Thus, the “Myeloid Signature” also can be used to predict patient response to therapy with the immunostimulatory bacteria. For example, it has been shown that the “Adenosine Signature” is nearly identical to the “Myeloid Signature” that is associated with poor response to atezolizumab (anti-PD-L1) monotherapy in renal cell carcinoma (RCC) patients, which is indicative of the role of adenosine in tumor escape from anti-PD-L1 therapy (see, e.g., McDermott et al. (2018) Nature Medicine 24:749-757). Tumor-myeloid and tumor-adenosine NanoString signature panels are available and can be used for the selection of patients.

[0916] Macrophages limit T-cell infiltration into solid tumors and suppress their function, for example, in triple negative breast cancer (see, e.g., Keren et al. (2018) Cell 174:1373-1387). In certain cancers, such as CRC, macrophages dominate the intratumoral immune population and promote T-cell exclusion, and as a result, tumor-associated macrophages are associated with poor prognosis in CRC (see, e.g., Bindea et al. (2013) Immunity 39:782-795). Immunoscore®, a method to estimate the prognosis of cancer patients, based on the immune cells that infiltrate the cancer and surround it, can be used to measure T-cell exclusion or T-cell infiltration. Immunoscore® incorporates the effects of the host immune response into cancer classification and improves prognostic accuracy. It measures the density of two T lymphocyte populations (CD3/CD8, CD3/CD45RO, or CD8/CD45RO) in the center and at the periphery of the tumor, and provides a score ranging from 0 (I0), when low densities of both cell types are found in both regions, to Immunoscore 4 (I4), when high densities are found in both regions. Low infiltration of T lymphocytes results in a low Immunoscore®, which correlates with high risk, while high infiltration of T lymphocytes results in a high Immunoscore®, which correlates with low risk. Immunoscore®, thus, can be evaluated as a prospective biomarker to identify patients that will respond to therapy with the immunostimulatory bacteria provided herein. For example, T-cell poor/uninflamed tumors can be treated, because the immunostimulatory bacteria provided herein induce T-cell infiltration in cold tumors. Such tumors represent a high, unmet need population that is refractory to checkpoint inhibition.

[0917] Extracellular adenosine is produced by the sequential activities of membrane associated ectoenzymes, CD39 (ecto-nucleoside triphosphate diphosphohydrolase 1, or NTPDase1) and CD73 (ecto-5′-nucleotidase), which are expressed on tumor stromal cells, together producing adenosine by phosphohydrolysis of ATP or ADP that is produced from dead or dying cells. CD39 converts extracellular ATP (or ADP) to 5′-AMP, which is converted to adenosine by CD73. Expression of CD39 and CD73 on endothelial cells is increased under the hypoxic conditions of the tumor microenvironment, thereby increasing levels of adenosine. Thus, CD39 and CD73 can be used as biomarkers that indicate adenosine-rich tumors that can be targeted with the immunostimulatory bacteria provided herein.

[0918] CD38, also known as cyclic ADP ribose hydrolase, is a glycoprotein that is found on the surface of many immune cells, including CD4⁺ T-cells, CD8⁺ T-cells, B lymphocytes, and natural killer cells. The loss of CD38, which is a marker of cell activation, is associated with impaired immune responses, and has been linked to leukemias, myelomas, and solid tumors. Additionally, increased expression of CD38 is an unfavorable diagnostic marker in chronic lymphocytic leukemia and is associated with increased disease progression. CD38 also is used as a target for daratumumab (Darzalex®), which has been approved for the treatment of multiple myeloma. CD68 is highly expressed by monocytes, circulating macrophages, and by tissue macrophages (e.g., Kupffer cells, microglia). FoxP3 is involved in immune system responses, and acts as a regulator in the development and function of regulatory T-cells (or Tregs), which are immunosuppressive. In cancer, an excess of regulatory T-cell activity can prevent the immune system from destroying cancer cells. Thus, CD38, CD68, and FoxP3 also can be used as biomarkers for the selection of patients that are likely to respond to therapy with the immunostimulatory bacteria herein.

[0919] b. Diagnostics to Assess or Detect Activity of the Immunostimulatory Bacteria are Indicative of the Effectiveness of Treatment

[0920] Biomarkers can be used to monitor the immunostimulatory bacteria following treatment. Biomarkers occur in tumor samples and/or in body fluid samples, such as blood, plasma, urine, saliva, and other fluids. Validated, peripheral blood biomarkers are used to evaluate the immune status of patients prior to and during treatment, to determine changes in the immune status, which correlate with the effectiveness of treatment. A change to, or an increase in, anti-tumor immune response status indicates that treatment with the immunostimulatory bacteria is having an effect. Immunomodulatory activity of the immunostimulatory bacteria provided herein, for example, in dose escalation and expansion studies, can be assessed. Examination of biomarkers reveals prognostic and predictive factors relating to disease (e.g., a tumor) status and its treatment, which can aid in monitoring treatment. Evaluating the tumor microenvironment, for example, provides insights into the mechanism of tumor responses to immunotherapies. Serum biomarkers to detect immunomodulatory activity of the immunostimulatory bacteria include, but are not limited to, CXCL10 (IP-10), CXCL9, interferon-β, interferon-γ, proinflammatory serum cytokines (e.g., IL-6, TNF-α, MCP-1/CCL1), and IL-18 binding protein.

[0921] CXCL10 and CXCL9 are chemokines that are necessary for CD8⁺ T-cell activation and trafficking to tumors, for example, in response to immunotherapies. In a phase 3 trial of nivolumab, an anti-PD-1 immune checkpoint inhibitor, for the treatment of previously treated patients with metastatic renal cell carcinoma (mRCC), immune pharmacodynamic effects that were shared by the majority of patients, irrespective of the dose administered, were identified. Assessment of the IFN-γ regulated serum chemokines CXCL9 and CXCL10 was performed using a multiplex panel based on Luminex technology (Myriad® Rules-Based Medicine (RBM)), and the results demonstrated that increased CXCL9 and CXCL10 serum levels, as well as increased transcription in the tumor, correlated with clinical response. Median increases in chemokine levels after treatment with nivolumab from baseline were 101% for CXCL9, and 37% for CXCL10, in peripheral blood (see, e.g., Choueiri et al. (2016) Clin. Cancer Res. 22(22):5461-5471). Additionally, treatment of patients with advanced solid tumors or lymphomas with the MK-1454 STING agonist (Merck), resulted in a dose-dependent increase in serum CXCL10 after intratumoral dosing (see, e.g., Harrington et al. ESMO Annual Meeting (2018)). Dose-dependent increases in serum levels of IFN-β were observed following intratumoral dosing of the ADU-S100 STING agonist (Aduro) (see, e.g., Meric-Bernstam et al. ASCO Annual Meeting (2019)). Additionally, intravenous administration of VNP20009 induced a dose-dependent increase in the serum levels of the pro-inflammatory cytokines IL-6, TNF-α, IL-1β, and IL-12 (see, e.g., Toso et al. (2002) J. Clin. Oncol. 20(1):142-152).

[0922] IL-18 participates in protective immune responses to intracellular bacteria, fungi and viruses, and has demonstrated anti-tumor activity in preclinical models of lung cancer, breast cancer, sarcoma, and melanoma. The biological activity of IL-18 is modulated in a negative feedback loop by IL-18 binding protein (IL-18BP), induced through IFN-γ. Thus, serum levels of IL-18BP are predictive of clinical IFN-γ activity. The intravenous administration of recombinant human IL-18 (rhIL-18) to patients with advanced cancers resulted in increased serum concentrations of IL-18 binding protein in a dose-dependent manner, as well as increases in IFN-γ, GM-CSF, and soluble Fas ligand (see, e.g., Robertson et al. (2006) Clin. Cancer Res. 12(14):4265-4273). Additionally, the levels of IL-18BP in urine and serum were observed to correlate with tumor status in patients with prostate cancer; significant differences in urinary IL-18BP levels were found between cases with and without prostate cancer, and increased serum IL-18BP levels correlated with increasing prostate cancer Gleason score, demonstrating that elevated IL-18BP secretion from prostate cancer cells can be indicative of an attempt by cancer to escape immune surveillance (see, e.g., Fujita et al. (2011) Int. J. Cancer 129(2):424-432). Thus, IL-18BP can be used as a biomarker for tumor immune responses.

[0923] 2. Tumors

[0924] The immunostimulatory bacteria, combinations, uses, and methods provided herein are applicable to treating all types of tumors, including cancers, particularly solid tumors, including lung cancer, bladder cancer, non-small cell lung cancer, gastric cancers, head and neck cancers, ovarian cancer, liver cancer, pancreatic cancer, kidney cancer, breast cancer, colorectal cancer, and prostate cancer. The methods also can be used for treating hematological cancers.

[0925] Tumors and cancers subject to treatment by the immunostimulatory bacteria, compositions, combinations, uses, and methods provided herein include, but are not limited to, those that originate in the immune system, skeletal system, muscles and heart, breast, pancreas, gastrointestinal tract, central and peripheral nervous system, renal system, reproductive system, respiratory system, skin, connective tissue systems, including joints, fatty tissues, and the circulatory system, including blood vessel walls. Examples of tumors that can be treated with the immunostimulatory bacteria provided herein include carcinomas, gliomas, sarcomas (including liposarcoma), adenocarcinomas, adenosarcomas, and adenomas. Such tumors can occur in virtually all parts of the body, including, for example, the breast, heart, lung, small intestine, colon, spleen, kidney, bladder, head and neck, ovary, prostate, brain, pancreas, skin, bone, bone marrow, blood, thymus, uterus, testicles, cervix, or liver.

[0926] Tumors of the skeletal system include, for example, sarcomas and blastomas, such as osteosarcoma, chondrosarcoma, and chondroblastoma. Muscle and heart tumors include tumors of both skeletal and smooth muscles, e.g., leiomyomas (benign tumors of smooth muscle), leiomyosarcomas, rhabdomyomas (benign tumors of skeletal muscle), rhabdomyosarcomas, and cardiac sarcomas. Tumors of the gastrointestinal tract include, e.g., tumors of the mouth, esophagus, stomach, small intestine, and colon, and colorectal tumors, as well as tumors of gastrointestinal secretory organs, such as the salivary glands, liver, pancreas, and the biliary tract. Tumors of the central nervous system (CNS) include tumors of the brain, retina, and spinal cord, and can also originate in associated connective tissue, bone, blood vessels, or nervous tissue. Treatment of tumors of the peripheral nervous system are also contemplated. Tumors of the peripheral nervous system include malignant peripheral nerve sheath tumors. Tumors of the renal system include those of the kidneys, e.g., renal cell carcinoma, as well as tumors of the ureters and bladder. Tumors of the reproductive system include tumors of the cervix, uterus, ovary, prostate, testes, and related secretory glands. Tumors of the immune system include both blood-based and solid tumors, including lymphomas, e.g., both Hodgkin's and non-Hodgkin's lymphomas. Tumors of the respiratory system include tumors of the nasal passages, bronchi, and lungs. Tumors of the breast include, e.g., both lobular and ductal carcinomas.

[0927] Other examples of tumors that can be treated by the immunostimulatory bacteria and methods provided herein include Kaposi's sarcoma, CNS neoplasms, neuroblastomas, capillary hemangioblastomas, meningiomas and cerebral metastases, melanoma, gastrointestinal and renal carcinomas and sarcomas, rhabdomyosarcoma, glioblastoma (such as glioblastoma multiforme), and leiomyosarcoma. Examples of other cancers that can be treated as provided herein include, but are not limited to, lymphoma, blastoma, neuroendocrine tumors, mesothelioma, schwannoma, meningioma, melanoma, and leukemia or lymphoid malignancies. Examples of such cancers include hematologic malignancies, such as Hodgkin's lymphoma, non-Hodgkin's lymphomas (Burkitt's lymphoma, small lymphocytic lymphoma, chronic lymphocytic leukemia, mycosis fungoides, mantle cell lymphoma, follicular lymphoma, diffuse large B-cell lymphoma, marginal zone lymphoma, hairy cell leukemia, and lymphoplasmacytic leukemia), tumors of lymphocyte precursor cells, including B-cell acute lymphoblastic leukemia/lymphoma, and T-cell acute lymphoblastic leukemia/lymphoma, thymoma, tumors of the mature T and NK cells, including peripheral T-cell leukemias, adult T-cell leukemia/T-cell lymphomas and large granular lymphocytic leukemia, Langerhans cell histiocytosis, myeloid neoplasias such as acute myelogenous leukemias, including acute myeloid leukemia (AML) with maturation, AML without differentiation, acute promyelocytic leukemia, acute myelomonocytic leukemia, and acute monocytic leukemias, myelodysplastic syndromes, and chronic myeloproliferative disorders, including chronic myelogenous leukemia; tumors of the central nervous system, such as glioma, glioblastoma, neuroblastoma, astrocytoma, medulloblastoma, ependymoma, and retinoblastoma; solid tumors of the head and neck (e.g., nasopharyngeal cancer, salivary gland carcinoma, and esophageal cancer), lung (e.g., small-cell lung cancer, non-small cell lung cancer, adenocarcinoma of the lung, and squamous carcinoma of the lung), digestive system (e.g., gastric or stomach cancer, including gastrointestinal cancer, cancer of the bile duct or biliary tract, colon cancer, rectal cancer, colorectal cancer, and anal carcinoma), reproductive system (e.g., testicular, penile, prostate, uterine, vaginal, vulval, cervical, ovarian, and endometrial cancers), skin (e.g., melanoma, basal cell carcinoma, squamous cell cancer, actinic keratosis, and cutaneous melanoma), liver (e.g., liver cancer, hepatic carcinoma, hepatocellular cancer, and hepatoma), bone (e.g., osteoclastoma, and osteolytic bone cancers), additional tissues and organs (e.g., pancreatic cancer, bladder cancer, kidney or renal cancer, thyroid cancer, breast cancer, cancer of the peritoneum, and Kaposi's sarcoma), tumors of the vascular system (e.g., angiosarcoma and hemangiopericytoma), Wilms' tumor, retinoblastoma, osteosarcoma, and Ewing's sarcoma.

[0928] 3. Administration

[0929] In practicing the uses and methods herein, immunostimulatory bacteria provided herein can be administered to a subject, including a subject having a tumor or having neoplastic cells, or a subject to be immunized. One or more steps can be performed prior to, simultaneously with, or after administration of the immunostimulatory bacteria to the subject, including, but not limited to, diagnosing the subject with a condition appropriate for administering immunostimulatory bacteria, determining the immunocompetence of the subject, immunizing the subject, treating the subject with a chemotherapeutic agent, treating the subject with radiation, or surgically treating the subject.

[0930] For embodiments that include administering immunostimulatory bacteria to a tumor-bearing subject for therapeutic purposes, the subject typically has previously been diagnosed with a neoplastic condition. Diagnostic methods also can include determining the type of neoplastic condition, determining the stage of the neoplastic condition, determining the size of one or more tumors in the subject, determining the presence or absence of metastatic or neoplastic cells in the lymph nodes of the subject, or determining the presence of metastases in the subject.

[0931] Some embodiments of the therapeutic methods for administering immunostimulatory bacteria to a subject can include a step of determining the size of the primary tumor or the stage of the neoplastic disease, and, if the size of the primary tumor is equal to or above a threshold volume, or if the stage of the neoplastic disease is at or above a threshold stage, an immunostimulatory bacterium is administered to the subject. In a similar embodiment, if the size of the primary tumor is below a threshold volume, or if the stage of the neoplastic disease is at or below a threshold stage, the immunostimulatory bacterium is not yet administered to the subject; such methods can include monitoring the subject until the tumor size or neoplastic disease stage reaches a threshold amount, and then administering the immunostimulatory bacterium to the subject. Threshold sizes can vary according to several factors, including rate of growth of the tumor, ability of the immunostimulatory bacterium to infect a tumor, and immunocompetence of the subject. Generally, the threshold size will be a size sufficient for an immunostimulatory bacterium to accumulate and replicate in or near the tumor, without being completely removed by the host's immune system, and will typically also be a size sufficient to sustain a bacterial infection for a time long enough for the host to mount an immune response against the tumor cells, typically about one week or more, about ten days or more, or about two weeks or more. Exemplary threshold stages are any stage beyond the lowest stage (e.g., Stage I or equivalent), or any stage where the primary tumor is larger than a threshold size, or any stage where metastatic cells are detected.

[0932] Any mode of administration of a microorganism to a subject can be used, provided the mode of administration permits the immunostimulatory bacteria to enter a tumor or metastasis. Modes of administration can include, but are not limited to, intravenous, intraperitoneal, subcutaneous, intramuscular, topical, intratumoral, multipuncture, inhalation, intranasal, oral, intracavity (e.g., administering to the bladder via a catheter, or administering to the gut by suppository or enema), aural, rectal, and ocular administration.

[0933] One skilled in the art can select any mode of administration compatible with the subject and the bacteria, and that also is likely to result in the bacteria reaching tumors and/or metastases. The route of administration can be selected by one skilled in the art according to any of a variety of factors, including the nature of the disease, the kind of tumor, and the particular bacteria contained in the pharmaceutical composition. Administration to the target site can be performed, for example, by ballistic delivery, or as a colloidal dispersion system, or systemic administration can be performed by injection into an artery.

[0934] The dosage regimen can be any of a variety of methods and amounts, and can be determined by one skilled in the art according to known clinical factors. A single dose can be therapeutically effective for treating a disease or disorder in which immune stimulation effects treatment. Exemplary of such stimulation is an immune response, that includes, but is not limited to, one or both of a specific immune response and non-specific immune response, both specific and non-specific responses, innate response, primary immune response, adaptive immunity, secondary immune response, memory immune response, immune cell activation, immune cell proliferation, immune cell differentiation, and cytokine expression.

[0935] As is known in the medical arts, dosages for a subject can depend on many factors, including the subject's species, size, body surface area, age, sex, immunocompetence, and general health, the particular bacteria to be administered, the duration and route of administration, the kind and stage of the disease, for example, the tumor size, and other compounds, such as drugs, being administered concurrently. In addition to the above factors, such levels can be affected by the infectivity of the bacteria and the nature of the bacteria, as can be determined by one skilled in the art. In the present methods, appropriate minimum dosage levels of bacteria can be levels sufficient for the bacteria to survive, grow, and replicate in a tumor or metastasis. Exemplary minimum levels for administering a bacterium to a 65 kg human can include at least about 5×10⁶ colony forming units (CFUs), at least about 1×10⁷ CFUs, at least about 5×10⁷ CFUs, at least about 1×10⁸ CFUs, or at least about 1×10⁹ CFUs. In the present methods, appropriate maximum dosage levels of bacteria can be levels that are not toxic to the host, levels that do not cause splenomegaly of 3× or more, or levels that do not result in colonies or plaques in normal tissues or organs after about 1 day, or after about 3 days, or after about 7 days. Exemplary maximum levels for administering a bacterium to a 65 kg human can include no more than about 5×10¹¹ CFUs, no more than about 1×10¹¹ CFUs, no more than about 5×10¹⁰ CFUs, no more than about 1×10¹⁰ CFUs, or no more than about 1×10⁹ CFUs.

[0936] The methods and uses provided herein can include a single administration of immunostimulatory bacteria to a subject, or multiple administrations of immunostimulatory bacteria to a subject, or others of a variety of regimens, including combination therapies with other anti-tumor therapeutics and/or treatments. These include, for example, cellular therapies, such as administration of modified immune cells; CAR-T therapy; CRISPR therapy; checkpoint inhibitors, such as antibodies (e.g., anti-PD-1 antibodies, anti-PD-L1 antibodies, and anti-CTLA-4 antibodies, and other such immunotherapies); chemotherapeutic compounds, such as nucleoside analogs; surgery; and radiotherapy. Other cancer therapies also include anti-VEGF, anti-VEGFR, anti-VEGFR2, anti-TGF-β, or anti-IL-6 antibodies, or fragments thereof, cancer vaccines, and oncolytic viruses.

[0937] In some embodiments, a single administration is sufficient to establish immunostimulatory bacteria in a tumor, where the bacteria can colonize, and can cause or enhance an anti-tumor response in the subject. In other embodiments, the immunostimulatory bacteria provided for use in the methods herein can be administered on different occasions, separated in time, typically by at least one day. Separate administrations can increase the likelihood of delivering a bacterium to a tumor or metastasis, where a previous administration may have been ineffective in delivering the bacterium to a tumor or metastasis. In embodiments, separate administrations can increase the locations on a tumor or metastasis where bacterial colonization/proliferation can occur, or can otherwise increase the titer of bacteria accumulated in the tumor, which can increase eliciting or enhancing a host's anti-tumor immune response.

[0938] When separate administrations are performed, each administration can be a dosage amount that is the same or different relative to other administration dosage amounts. In one embodiment, all administration dosage amounts are the same. In other embodiments, a first dosage amount can be a larger dosage amount than one or more subsequent dosage amounts, for example, at least 10× larger, at least 100× larger, or at least 1000× larger, than subsequent dosage amounts. In one example of a method of separate administrations, in which the first dosage amount is greater than one or more subsequent dosage amounts, all subsequent dosage amounts can be the same, smaller amount, relative to the first administration.

[0939] Separate administrations can include any number of two or more administrations, including two, three, four, five, or six administrations. One skilled in the art readily can determine the number of administrations to perform, or the desirability of performing one or more additional administrations, according to methods known in the art for monitoring therapeutic methods, and other monitoring methods provided herein. Accordingly, the methods provided herein include methods of providing to the subject one or more administrations of immunostimulatory bacteria, where the number of administrations can be determined by monitoring the subject, and, based on the results of the monitoring, determining whether or not to provide one or more additional administrations. Deciding whether or not to provide one or more additional administrations can be based on a variety of monitoring results, including, but not limited to, indication of tumor growth or inhibition of tumor growth, appearance of new metastases or inhibition of metastasis, the subject's anti-bacterial antibody titer, the subject's anti-tumor antibody titer, the overall health of the subject, and the weight of the subject.

[0940] The time period between administrations can be any of a variety of time periods. The time period between administrations can be a function of any of a variety of factors, including monitoring steps, as described in relation to the number of administrations, the time period for a subject to mount an immune response, the time period for a subject to clear bacteria from normal tissue, or the time period for bacterial colonization/proliferation in the tumor or metastasis. In one example, the time period can be a function of the time period for a subject to mount an immune response; for example, the time period can be more than the time period for a subject to mount an immune response, such as more than about one week, more than about ten days, more than about two weeks, or more than about a month. In another example, the time period can be less than the time period for a subject to mount an immune response, such as less than about one week, less than about ten days, less than about two weeks, or less than about a month. In another example, the time period can be a function of the time period for bacterial colonization/proliferation in the tumor or metastasis; for example, the time period can be more than the amount of time for a detectable signal to arise in a tumor or metastasis after administration of a microorganism expressing a detectable marker, such as about 3 days, about 5 days, about a week, about ten days, about two weeks, or about a month.

[0941] The methods used herein also can be performed by administering compositions, such as suspensions and other formulations, containing the immunostimulatory bacteria provided herein. Such compositions contain the bacteria and a pharmaceutically acceptable excipient or vehicle, as provided herein or known to those of skill in the art.

[0942] As discussed above, the uses and methods provided herein also can include administering one or more therapeutic compounds, such as anti-tumor compounds or other cancer therapeutics, to a subject, in addition to administering the immunostimulatory bacteria to the subject. The therapeutic compounds can act independently, or in conjunction with the immunostimulatory bacteria, for tumor therapeutic effects. Therapeutic compounds that can act independently include any of a variety of known chemotherapeutic compounds that can inhibit tumor growth, inhibit metastasis growth and/or formation, decrease the size of a tumor or metastasis, or eliminate a tumor or metastasis, without reducing the ability of the immunostimulatory bacteria to accumulate in a tumor, replicate in the tumor, and cause or enhance an anti-tumor immune response in the subject. Examples of such chemotherapeutic agents include, but are not limited to, alkylating agents, such as thiotepa and cyclophosphamide; alkyl sulfonates, such as busulfan, improsulfan, and piposulfan; androgens, such as calusterone, dromostanolone propionate, epitiostanol, mepitiostane, and testolactone; anti-adrenals, such as aminoglutethimide, mitotane, and trilostane; anti-androgens, such as flutamide, nilutamide, bicalutamide, leuprolide, and goserelin; antibiotics, such as aclacinomycin, actinomycin, anthramycin, azaserine, bleomycin, cactinomycin, calicheamicin, carubicin, carminomycin, carzinophilin, chromomycin, dactinomycin, daunorubicin, detorubicin, 6-diazo-5-oxo-L-norleucine, doxorubicin, epirubicin, esorubicin, idarubicin, marcellomycin, mitomycins, mycophenolic acid, nogalamycin, olivomycins, peplomycin, porfiromycin, puromycin, quelamycin, rodorubicin, streptonigrin, streptozocin, tubercidin, ubenimex, zinostatin, and zorubicin; anti-estrogens, including, for example, tamoxifen, raloxifene, aromatase inhibiting 4(5)-imidazoles, 4-hydroxytamoxifen, trioxifene, keoxifene, LY 117018, onapristone, and toremifene (Fareston®); anti-metabolites, such as methotrexate and 5-fluorouracil (5-FU); folic acid analogues, such as denopterin, methotrexate, pteropterin, and trimetrexate; aziridines, such as benzodepa, carboquone, meturedepa, and uredepa; ethylenimines and methylmelamines, including altretamine, triethylenemelamine, triethylenephosphoramide, triethylenethiophosphoramide, and trimethylol melamine; folic acid replenishers, such as folinic acid; nitrogen mustards, such as chlorambucil, chlornaphazine, chlorophosphamide, estramustine, ifosfamide, mechlorethamine, mechlorethamine oxide hydrochloride, melphalan, novembichin, phenesterine, prednimustine, trofosfamide, and uracil mustard; nitrosoureas, such as carmustine, chlorozotocin, fotemustine, lomustine, nimustine, and ranimustine; platinum analogs, such as cisplatin and carboplatin; vinblastine; platinum; proteins, such as arginine deiminase and asparaginase; purine analogs, such as fludarabine, 6-mercaptopurine, thiamiprine, and thioguanine; pyrimidine analogs, such as ancitabine, azacitidine, 6-azauridine, carmofur, cytarabine, dideoxyuridine, doxifluridine, enocitabine, floxuridine, and 5-FU; taxanes, such as paclitaxel and docetaxel, and albuminated forms thereof (i.e., nab-paclitaxel and nab-docetaxel); topoisomerase inhibitors, such as RFS-2000; thymidylate synthase inhibitors, such as Tomudex®; and additional chemotherapeutics, including aceglatone; aldophosphamide glycoside; aminolevulinic acid; amsacrine; bestrabucil; bisantrene; edatrexate; defosfamide; demecolcine; diaziquone; difluoromethylornithine (DFMO); eflornithine; elliptinium acetate; etoglucid; gallium nitrate; hydroxyurea; lentinan; lonidamine; mitoguazone; mitoxantrone; mopidamol; nitracrine; pentostatin; phenamet; pirarubicin; podophyllinic acid; 2-ethylhydrazide; procarbazine; PSK®; razoxane; sizofiran; spirogermanium; tenuazonic acid; triaziquone; 2,2′,2″-trichlorotriethylamine; urethan; vindesine; dacarbazine; mannomustine; mitobronitol; mitolactol; pipobroman; gacytosine; arabinoside (“Ara-C”); cyclophosphamide; thiotepa; chlorambucil; gemcitabine; 6-thioguanine; mercaptopurine; methotrexate; etoposide (VP-16); ifosfamide; mitomycin C; mitoxantrone; vincristine; vinorelbine; Navelbine; Novantrone; teniposide; daunomycin; aminopterin; Xeloda®; ibandronate; CPT-11; retinoic acid; esperamycins; capecitabine; and topoisomerase inhibitors, such as irinotecan. Pharmaceutically acceptable salts, acids, or derivatives of any of the above also can be used.

[0943] Therapeutic compounds that act in conjunction with the immunostimulatory bacteria include, for example, compounds that increase the immune response eliciting properties of the bacteria, e.g., by increasing expression of encoded therapeutic products, such as cytokines, chemokines, co-stimulatory molecules, proteins that constitutively induce type I IFNs, RNAi molecules that inhibit, suppress, or disrupt expression of checkpoint gene(s), a checkpoint inhibitor antibody and antibodies or fragments thereof against other targets, or compounds that can further augment bacterial colonization/proliferation. For example, a gene expression-altering compound can induce or increase transcription of a gene in a bacterium, such as an exogenous gene encoded on the plasmid, thereby provoking an immune response. Any of a wide variety of compounds that can alter gene expression are known in the art, including IPTG and RU486. Exemplary genes whose expression can be up-regulated include those encoding proteins and RNA molecules, including toxins, enzymes that can convert a prodrug to an anti-tumor drug, cytokines, transcription regulating proteins, shRNA, siRNA, and ribozymes. In other embodiments, therapeutic compounds that can act in conjunction with the immunostimulatory bacteria to increase the colonization/proliferation or immune response eliciting properties of the bacteria, are compounds that can interact with a bacterially-encoded gene product, and such interaction can result in an increased killing of tumor cells, or an increased anti-tumor immune response in the subject. A therapeutic compound that can interact with a bacterially-encoded gene product can include, for example, a prodrug or other compound that has little or no toxicity, or other biological activity in its subject-administered form, but after interaction with a bacterially-encoded gene product, the compound can develop a property that results in tumor cell death, including but not limited to, cytotoxicity, the ability to induce apoptosis, or the ability to trigger an immune response. A variety of prodrug-like substances are known in the art, including ganciclovir, 5-fluorouracil, 6-methylpurine deoxyriboside, cephalosporin-doxorubicin, 4-[(2-chloroethyl)(2-mesuloxyethyl)amino]benzoyl-L-glutamic acid, acetaminophen, indole-3-acetic acid, CB1954, 7-ethyl-10-[4-(1-piperidino)-1-piperidino]carbonyloxycamptothecin, bis-(2-chloroethyl)amino-4-hydroxyphenylaminomethanone 28, 1-chloromethyl-5-hydroxy-1,2-dihyro-3H-benz[e]indole, epirubicin-glucuronide, 5′-deoxy5-fluorouridine, cytosine arabinoside, and linamarin.

[0944] 4. Monitoring

[0945] The methods provided herein can further include one or more steps of monitoring the subject, monitoring the tumor, and/or monitoring the immunostimulatory bacteria administered to the subject. Any of a variety of monitoring steps can be included in the methods provided herein, including, but not limited to, monitoring tumor size, monitoring the presence and/or size of metastases, monitoring the subject's lymph nodes, monitoring the subject's weight or other health indicators, including blood or urine markers, monitoring anti-bacterial antibody titer, monitoring bacterial expression of a detectable gene product, and directly monitoring bacterial titer in a tumor, tissue, or organ of a subject.

[0946] The purpose of the monitoring can be simply for assessing the health state of the subject, or the progress of therapeutic treatment of the subject, or can be for determining whether or not further administration of the same or a different immunostimulatory bacterium is warranted, or for determining when or whether or not to administer a compound to the subject where the compound can act to increase the efficacy of the therapeutic method, or the compound can act to decrease the pathogenicity of the bacteria administered to the subject.

[0947] In some embodiments, the methods provided herein can include monitoring one or more bacterially-expressed genes. Bacteria, such as those provided herein or otherwise known in the art, can express one or more detectable gene products, including but not limited to, detectable proteins.

[0948] As provided herein, measurement of a detectable gene product expressed in a bacterium can provide an accurate determination of the level of bacteria present in the subject. As further provided herein, measurement of the location of the detectable gene product, for example, by imaging methods, including tomographic methods, can determine the localization of the bacteria in the subject. Accordingly, the methods provided herein that include monitoring a detectable bacterial gene product can be used to determine the presence or absence of the bacteria in one or more organs or tissues of a subject, and/or the presence or absence of the bacteria in a tumor or metastases of a subject. Further, the methods provided herein that include monitoring a detectable bacterial gene product can be used to determine the titer of bacteria present in one or more organs, tissues, tumors, or metastases. Methods that include monitoring the localization and/or titer of bacteria in a subject can be used for determining the pathogenicity of bacteria, since bacterial infection, and particularly the level of infection, of normal tissues and organs can indicate the pathogenicity of the bacteria. The methods that include monitoring the localization and/or titer of the immunostimulatory bacteria in a subject can be performed at multiple time points and, accordingly, can determine the rate of bacterial replication in a subject, including the rate of bacterial replication in one or more organs or tissues of a subject; accordingly, methods that include monitoring a bacterial gene product can be used for determining the replication competence of the bacteria. The methods provided herein also can be used to quantitate the amount of immunostimulatory bacteria present in a variety of organs or tissues, and tumors or metastases, and can thereby indicate the degree of preferential accumulation of the bacteria in a subject; accordingly, the bacterial gene product monitoring can be used in methods of determining the ability of the bacteria to accumulate in tumors or metastases, in preference to normal tissues or organs. Since the immunostimulatory bacteria used in the methods provided herein can accumulate in an entire tumor, or can accumulate at multiple sites in a tumor, and can also accumulate in metastases, the methods provided herein for monitoring a bacterial gene product can be used to determine the size of a tumor, or the number of metastases present in a subject. Monitoring such presence of a bacterial gene product in a tumor or metastasis over a range of time can be used to assess changes in the tumor or metastasis, including growth or shrinking of a tumor, or development of new metastases, or disappearance of metastases, and also can be used to determine the rate of growth or shrinking of a tumor, or the rate of development of new metastases or disappearance of metastases, or the change in the rate of growth or shrinking of a tumor, or the change in the rate of development of new metastases or disappearance of metastases. Accordingly, monitoring a bacterial gene product can be used for monitoring a neoplastic disease in a subject, or for determining the efficacy of treatment of a neoplastic disease, by determining the rate of growth or shrinking of a tumor, or the development of new metastases or disappearance of metastases, or the change in the rate of growth or shrinking of a tumor, or the development of new metastases or disappearance of metastases.

[0949] Any of a variety of detectable proteins can be detected by monitoring, exemplary of which are any of a variety of fluorescent proteins (e.g., green fluorescent proteins), any of a variety of luciferases, transferrin, or other iron-binding proteins; or receptors, binding proteins, and antibodies, where a compound that specifically binds the receptor, binding protein or antibody can be a detectable agent, or can be labeled with a detectable substance (e.g., a radionuclide or imaging agent).

[0950] Tumor and/or metastasis size can be monitored by any of a variety of methods known in the art, including external assessment methods, or tomographic or magnetic imaging methods. In addition to the methods known in the art, methods provided herein, for example, monitoring bacterial gene expression, can be used for monitoring tumor and/or metastasis size.

[0951] Monitoring size over several time points can provide information regarding the increase or decrease in the size of a tumor or metastasis, and can also provide information regarding the presence of additional tumors and/or metastases in the subject. Monitoring tumor size over several time points can provide information regarding the development of a neoplastic disease in a subject, including the efficacy of treatment of a neoplastic disease in a subject.

[0952] The methods provided herein also can include monitoring the antibody titer in a subject, including antibodies produced in response to administration of the immunostimulatory bacteria to a subject. The bacteria administered in the methods provided herein can elicit an immune response to endogenous bacterial antigens. The bacteria administered in the methods provided herein also can elicit an immune response to exogenous genes expressed by the bacteria. The bacteria administered in the methods provided herein also can elicit an immune response to tumor antigens. Monitoring antibody titer against bacterial antigens, bacterially-expressed exogenous gene products, or tumor antigens, can be used to monitor the toxicity of the bacteria, to monitor the efficacy of treatment methods, or to monitor the level of gene product(s) or antibodies for production and/or harvesting.

[0953] Monitoring antibody titer can be used to monitor the toxicity of the bacteria. Antibody titer against a bacteria can vary over the time period after administration of the bacteria to the subject, where at some particular time points, a low anti-(bacterial antigen) antibody titer can indicate a lower toxicity, while at other time points, a high anti-(bacterial antigen) antibody titer can indicate a higher toxicity. The bacteria used in the methods provided herein can be immunogenic, and can, therefore, elicit an immune response soon after administering the bacteria to the subject. Generally, immunostimulatory bacteria against which the immune system of a subject can mount a strong immune response can be bacteria that have low toxicity when the subject's immune system can remove the bacteria from all normal organs or tissues. Thus, in some embodiments, a high antibody titer against bacterial antigens soon after administering the bacteria to a subject can indicate low toxicity of the bacteria.

[0954] In other embodiments, monitoring antibody titer can be used to monitor the efficacy of treatment methods. In the methods provided herein, antibody titer, such as anti-(tumor antigen) antibody titer, can indicate the efficacy of a therapeutic method, such as a therapeutic method to treat neoplastic disease. Therapeutic methods provided herein can include causing or enhancing an immune response against a tumor and/or metastasis. Thus, by monitoring the anti-(tumor antigen) antibody titer, it is possible to monitor the efficacy of a therapeutic method in causing or enhancing an immune response against a tumor and/or metastasis.

[0955] In other embodiments, monitoring antibody titer can be used for monitoring the level of gene product(s) or antibodies for production and/or harvesting. As provided herein, methods can be used for producing proteins, RNA molecules, or other compounds, by expressing an exogenous gene in a microorganism that has accumulated in a tumor, in the tumor microenvironment, and/or in tumor-resident immune cells. Monitoring antibody titer against the protein, RNA molecule, or other compound can indicate the level of production of the protein, RNA molecule, or other compound by the tumor-accumulated microorganism, and also, can directly indicate the level of antibodies specific for such a protein, RNA molecule, or other compound.

[0956] The methods provided herein also can include methods of monitoring the health of a subject. Some of the methods provided herein are therapeutic methods, including neoplastic disease therapeutic methods. Monitoring the health of a subject can be used to determine the efficacy of the therapeutic method, as is known in the art. The methods provided herein also can include a step of administering to a subject an immunostimulatory bacterium, as provided herein. Monitoring the health of a subject can be used to determine the pathogenicity of an immunostimulatory bacterium administered to a subject. Any of a variety of health diagnostic methods for monitoring disease, such as neoplastic disease, infectious disease, or immune-related disease, can be monitored, as is known in the art. For example, the weight, blood pressure, pulse, breathing, color, temperature, or other observable state of a subject can indicate the health of a subject. In addition, the presence, or absence, or level of one or more components in a sample from a subject can indicate the health of a subject. Typical samples can include blood and urine samples, where the presence, or absence, or level of one or more components can be determined by performing, for example, a blood panel or a urine panel diagnostic test. Exemplary components indicative of a subject's health include, but are not limited to, white blood cell count, hematocrit, and c-reactive protein concentration.

[0957] The methods provided herein can include monitoring a therapy, where therapeutic decisions can be based on the results of the monitoring. Therapeutic methods provided herein can include administering to a subject immunostimulatory bacteria, where the bacteria can preferentially accumulate in a tumor, the tumor microenvironment, or in tumor-resident immune cells, and/or in metastases, and where the bacteria can cause or enhance an anti-tumor immune response. Such therapeutic methods can include a variety of steps, including multiple administrations of a particular immunostimulatory bacterium, administration of a second immunostimulatory bacterium, or administration of a therapeutic compound. Determination of the amount, timing, or type of immunostimulatory bacteria or compound to administer to the subject can be based on one or more results from monitoring the subject. For example, the antibody titer in a subject can be used to determine whether or not it is desirable to administer an immunostimulatory bacterium and, optionally, a compound, the quantity of bacteria and/or compound to administer, and the type of bacteria and/or compound to administer, where, for example, a low antibody titer can indicate the desirability of administering an additional immunostimulatory bacterium, a different immunostimulatory bacterium, and/or a therapeutic compound, such as a compound that induces bacterial gene expression, or a therapeutic compound that is effective independent of the immunostimulatory bacteria.

[0958] In another example, the overall health state of a subject can be used to determine whether or not it is desirable to administer an immunostimulatory bacterium and, optionally, a compound, the quantity of bacterium and/or compound to administer, and the type of bacterium and/or compound to administer, where, for example, determining that the subject is healthy can indicate the desirability of administering additional bacteria, different bacteria, or a therapeutic compound, such as a compound that induces bacterial gene/genetic payload/therapeutic product expression. In another example, monitoring a detectable bacterially-expressed gene product can be used to determine whether it is desirable to administer an immunostimulatory bacterium and, optionally, a compound, the quantity of bacterium and/or compound to administer, and the type of bacterium and/or compound to administer, where, for example, determining that the subject is healthy can indicate the desirability of administering additional bacteria, different bacteria, or a therapeutic compound, such as a compound that induces bacterial gene/genetic payload/therapeutic product expression. Such monitoring methods can be used to determine whether or not the therapeutic method is effective, whether or not the therapeutic method is pathogenic to the subject, whether or not the bacteria have accumulated in a tumor or metastasis, and whether or not the bacteria have accumulated in normal tissues or organs. Based on such determinations, the desirability and form of further therapeutic methods can be derived.

[0959] In another example, monitoring can determine whether or not immunostimulatory bacteria have accumulated in a tumor or metastasis of a subject. Upon such a determination, a decision can be made to further administer additional bacteria, a different immunostimulatory bacterium, and, optionally, a compound to the subject.

### H. Examples

[0960] The following examples are included for illustrative purposes only and are not intended to limit the scope of the invention.

### Example 1

### Auxotrophic Strains of S. typhimurium

### The Salmonella Strain YS1646 is Auxotrophic for Adenosine

[0961] Strains provided herein are engineered to be auxotrophic for adenosine. As a result, they are attenuated in vivo because they are unable to replicate in the low adenosine concentrations of normal tissue, and colonization occurs primarily in the solid tumor microenvironment (TME), where adenosine levels are high. The Salmonella strain YS1646 is a derivative of the wild-type strain ATCC 14028, and was engineered to be auxotrophic for purines due to disruption of the purI gene (synonymous with purM) (see, e.g., Low et al. (2004) Methods Mol. Med. 90:47-60). Subsequent analysis of the entire genome of YS1646 demonstrated that the purI gene was not in fact deleted, but was instead disrupted by a chromosomal inversion (see, e.g., Broadway et al. (2014) J. Biotechnol. 192:177-178), and that the entire gene is still contained within two parts of the YS1646 chromosome that is flanked by insertion sequences, one of which has an active transposase. The presence of the complete genetic sequence of the purI gene, disrupted by means of a chromosomal reengagement, leaves open the possibility of reversion to a wild-type gene. While it has previously been demonstrated that the purine auxotrophy of YS1646 was stable after >140 serial passages in vitro, it was not clear what the reversion rate is (see, e.g., Clairmont et al. (2000) J. Infect. Dis. 181:1996-2002).

[0962] It is shown herein that, when provided with adenosine, strain YS1646 is able to replicate in minimal medium, whereas the wild-type parental strain, ATCC 14028, can grow in minimal media that is not supplemented with adenosine. Strain YS1646 was grown overnight in lysogeny broth (LB) medium, washed with M9 minimal medium, and diluted into M9 minimal medium containing no adenosine, or increasing concentrations of adenosine. Growth was measured using a SpectraMax® M3 Spectrophotometer (Molecular Devices) at 37° C., reading the OD₆₀₀ every 15 minutes.

[0963] The results showed that, unlike a wild-type strain (ATCC 14028), which was able to grow in all concentrations of adenosine, strain YS1646 only was able to replicate when adenosine was provided at concentrations ranging from 11 to 300 micromolar, and was completely unable to replicate in M9 alone, or in M9 supplemented with 130 nanomolar adenosine. These data demonstrate that purI mutants are able to replicate at concentrations of adenosine that are found in the tumor microenvironment, but not at concentrations found in normal tissues. Engineered adenosine auxotrophic strains exemplified herein include strains in which all or portions of the purI open reading frame are deleted from the chromosome to prevent reversion to wild-type. Such gene deletions can be achieved by any method known to one of skill in the art, including the lambda red system, as described below. The Salmonella Strain YS1646 is Auxotrophic for ATP

[0964] In addition to the purine and adenosine auxotrophy, it was determined whether the purI-deleted strain also can scavenge ATP. ATP accumulates to high levels in the tumor microenvironment, due to leakage from dying tumor cells. It is shown herein that, when provided with ATP, strain YS1646 is able to replicate in minimal media, but is unable to grow when not supplemented with ATP. To demonstrate this, strain YS1646 was grown overnight in LB medium, washed with M9 minimal medium, and diluted into M9 minimal medium containing no ATP, or increasing concentrations of ATP (Fisher). Growth was measured using a SpectraMax® M3 Spectrophotometer (Molecular Devices) at 37° C., reading the OD₆₀₀ every 15 minutes. The results demonstrated that strain YS1646 is able to replicate when ATP is provided at concentrations of 0.012 mM, but not in M9 alone.

### Example 2

### Defects in Intracellular Replication are Attributed to the msbB Mutation

[0965] The YS1646 strain contains mutations in purI, which limits replication to sites containing high concentrations of purines, adenosine, or ATP, and mutations in msbB, which alters the lipopolysaccharide (LPS) surface coat in order to reduce TLR4-mediated pro-inflammatory signaling. It also has been established that, unlike wild-type Salmonella, strain YS1646 is unable to replicate in macrophages. Experiments were performed to determine which of these genetic mutations is responsible for conferring that phenotype within the wild-type strain, ATCC 14028.

[0966] In this assay, mouse RAW macrophage cells (InvivoGen, San Diego, Ca.) were infected with wild-type Salmonella strains containing deletions in purI, msbB, or both, at a multiplicity of infection (MOI) of approximately 5 bacteria per cell for 30 minutes, then the cells were washed with PBS, and medium containing gentamicin was added to kill extracellular bacteria. Intracellular bacteria are not killed by gentamicin, as it cannot cross the cell membrane. At various time points after infection, cell monolayers were lysed by osmotic shock with water, and the cell lysates were diluted and plated on LB agar to enumerate surviving colony forming units (CFUs).

[0967] As shown in the table below, wild-type Salmonella strains containing only the purI⁻ mutation still were able to replicate. This explains why there is only a modest improvement in tolerability observed with the purI deletion alone, while achieving a high degree of specificity to the tumor microenvironment. Strains containing only the msbB⁻ mutation, as well as strains containing the purI⁻ and msbB⁻ mutations, were unable to replicate, and were rapidly cleared from cells within 48 hours.

| | CFUs/Well | | | | | |
|---|---|---|---|---|---|---|
| | ATCC 14028 | | ATCC 14028 | | ATCC 14028 | |
| Hours | ΔpurI | | ΔpurI/ΔmsbB | | ΔmsbB | |
| 1 | 104000 | 108000 | 68000 | 68000 | 88000 | 40000 |
| 2.5 | 5600 | 6000 | 760 | 960 | 3200 | 3200 |
| 5 | 5600 | 4000 | 1120 | 880 | 800 | 680 |
| 27 | 11200 | 5600 | 4 | 4 | 20 | 4 |

### Example 3

### Salmonella Asd Gene Knockout Strain Engineering and Characterization

[0968] Strain YS1646Δasd was prepared. It is an attenuated Salmonella typhimurium strain derived from strain YS1646 (which can be purchased from ATCC, Catalog #202165) that has been engineered to have a deletion in the asd gene. In this example, the Salmonella typhimurium strain YS1646Δasd was engineered using modifications of the method of Datsenko and Wanner (Proc. Natl. Acad. Sci. U.S.A. 97:6640-6645 (2000)), as described below.

Introduction of the Lambda Red Helper Plasmid into Strain YS1646

[0969] The YS1646 strain was prepared to be electrocompetent as described previously (Sambrook J. (1998) Molecular Cloning, A Laboratory Manual, 2^{nd} Ed., Cold Spring Harbor, N.Y.: Cold Spring Harbor Laboratory), by growing a culture in LB and concentrating 100-fold, and then washing three times with ice-cold 10% glycerol. The electrocompetent strain was electroporated with the Lambda red helper plasmid pKD46 (SEQ ID NO:218), using a 0.2 cm gap cuvette at the following settings: 2.5 kV, 186 ohms, and 50 μF. Transformants carrying pKD46 were grown in 5 mL SOC medium with ampicillin and 1 mM L-arabinose at 30° C., and selected on LB agar plates containing ampicillin. A YS1646 clone containing the lambda red helper plasmid pKD46 then was made electrocompetent, as described above for strain YS1646.

### Construction of asd Gene Knockout Cassette

[0970] The asd gene from the genome of strain YS1646 (Broadway et al. (2014) J. Biotechnology 192:177-178) was used for designing the asd gene knockout cassette. A plasmid containing 204 and 203 base pairs (bps) of homology to the left hand and right hand regions, respectively, of the asd gene, was transformed into DH5-alpha competent cells (Thermo Fisher Scientific). A kanamycin gene cassette flanked by loxP sites was cloned into this plasmid. The asd gene knockout cassette then was PCR amplified using primers asd-1 and asd-2 (see, Table 1), and gel purified.

### Deletion of asd Gene

[0971] The YS1646 strain carrying plasmid pKD46 was electroporated with the gel-purified linear asd gene knock-out cassette. Electroporated cells were recovered in SOC medium and plated onto LB agar plates supplemented with kanamycin (20 μg/mL) and diaminopimelic acid (DAP, 50 μg/mL). During this step, lambda red recombinase induces homologous recombination of the chromosomal asd gene with the kan cassette (due to the presence of homologous flanking sequences upstream and downstream of the chromosomal asd gene), and knockout of the chromosomal copy of the asd gene occurs. The presence of the disrupted asd gene in the selected kanamycin-resistant clones was confirmed by PCR amplification, with primers from the YS1646 genome flanking the sites of disruption (primer asd-3), and from the multi-cloning site (primer scFv-3) (see, Table 1). Colonies were also replica plated onto LB plates, with and without supplemental DAP, to demonstrate DAP auxotrophy. All clones with the asd gene deletion were unable to grow in the absence of supplemental DAP, demonstrating DAP auxotrophy.

TABLE 1
Primer Information

| Primer | | SEQ |
|---|---|---|
| Name | Primer Sequence | ID NO. |
| asd-1 | ccttcctaacgcaaattccctg | 219 |
| asd-2 | ccaatgctctgcttaactcctg | 220 |
| asd-3 | gcctcgccatgtttcagtacg | 221 |
| asd-4 | ggtctggtgcattccgagtac | 222 |
| scFv-3 | cataatctgggtccttggtctgc | 223 |
| APR-001 | aaaaaagcttgcagctctggcccgtg | 226 |
| APR-002 | aaaaaagcttttagaaaaactcatcgag | 227 |
| | catcaaatga | |
| APR-003 | acactagaaggacagtatttggtatctg | 228 |
| APR-004 | agccgtagttaggccacc | 229 |
| flic-1 | cgttatcggcaatctggaggc | 232 |
| flic-2 | ccagcccttacaacagtggtc | 233 |
| flic-3 | gtctgtcaacaactggtctaacgg | 234 |
| flic-4 | agacggtcctcatccagataagg | 235 |
| fljb-1 | ttccagacgacaagagtatcgc | 236 |
| fljb-2 | cctnaggtnatccgaagccagaatc | 237 |
| fljb-3 | caccaggtitticacgctgc | 238 |
| fljb-4 | acacgcatttacgcctgtcg | 239 |
| pagp-1 | gcgtgacggttctgagtgct | 315 |
| pagp-2 | cgtctttgctgccatcttccg | 316 |
| pagp-3 | acaataacgacgactccgataagg | 317 |
| pagp-4 | ctgctgaatgtgctgattaacctg | 318 |
| ansb-1 | accttagaagatagccgcaaagc | 319 |
| ansb-2 | cagagacatgacacccacgattatc | 320 |
| ansb-3 | gcaaaccgctatccagaacga | 321 |
| ansb-4 | agtttaagtatgccgtggtactgc | 322 |
| csgd-1 | cacttgctnaagatngtaatggctag | 323 |
| csgd-2 | ggtgtattcgctttcccatttgtc | 324 |
| csgd-3 | tgtgctgtccaggttaatgcc | 325 |
| csgd-4 | gacgacggttttctcgaagtctc | 326 |

### Kanamycin Gene Cassette Removal

[0972] The kan selectable marker was removed by using the Cre/loxP site-specific recombination system. The YS1646Δasd gene Kan^{R} mutant was transformed with pJW168 (SEQ ID NO:224), a temperature-sensitive plasmid expressing the Cre recombinase. Amp^{R} colonies were selected at 30° C.; pJW168 was subsequently eliminated by growth at 42° C. A selected clone was tested for loss of kan by replica plating on LB agar plates with and without kanamycin, and confirmed by PCR verification using primers from the YS1646 genome flanking the sites of disruption (primers asd-3 and asd-4; for primer sequences, see Table 1).

### Confirmation of Functional Asd Deletion Mutant Strain YS1646Δasd (Also Designated AST-101)

[0973] The Δasd mutant was unable to grow on LB agar plates at 37° C., but was able to grow on LB plates containing 50 μg/mL diaminopimelic acid (DAP). The Δasd mutant growth rate was evaluated in LB liquid media; it was unable to grow in liquid LB, but was able to grow in LB supplemented with 50 μg/mL DAP, as determined by measuring absorbance at 600 nM.

Sequence Confirmation of the Asd Locus Sequence in Strain YS1646Δasd after asd Gene Deletion

[0974] The asd gene deletion strain was verified by DNA sequencing using primers asd-3 and asd-4 (see, Table 1). Sequencing of the region flanking the asd locus was performed, and the sequence confirmed that the asd gene was deleted from the YS1646 chromosome.

Complementation of Asd Deletion by Asd Expression from Plasmids

[0975] A plasmid, pATIU6 (SEQ ID NO:225), was chemically synthesized and assembled. The plasmid contained the following features: a high copy (pUC19) origin of replication, a U6 promoter for driving expression of a short hairpin, an ampicillin resistance gene flanked by HindIII restriction sites for subsequent removal, and the asd gene containing 85 base pairs of sequence upstream of the start codon (SEQ ID NO:246). Into this vector, shRNAs targeting murine TREX1 were introduced by restriction digestion with SpeI and XhoI, and ligation and cloning into E. coli DH5-alpha cells. The resulting plasmid was designated pATI-shTREX1.

Electroporation of Plasmids into Immunostimulatory Bacterial Strains

[0976] Selected plasmids, containing expression cassettes encoding immunostimulatory proteins and a functional asd gene, were electroporated into S. typhimurium strains lacking the asd gene with a BTX® ECM600 electroporator, using a 0.2 cm gap cuvette (BTX, San Diego, Calif.) at the following settings: 2.5 kV, 186 ohms, and 50 μF. Electroporated cells were added to 1 mL SOC supplemented with 50 μM diaminopimelic acid (DAP), incubated for 1 hour at 37° C., and then spread onto agar plates that do not contain DAP, to select for strains that received plasmids with a functional asd gene. After single colony isolation, cell banks were produced by inoculating a flask of sterile lysogeny broth (LB) with a single well isolated colony of S. typhimurium, and incubating at 37° C. with agitation at 250 RPM. After the culture was grown to stationary phase, the bacteria were washed in PBS containing 10% glycerol, and stored in aliquots frozen at less than −60° C.

[0977] The plasmid pATI-shTREX1 was amplified in E. coli and purified for transformation into the YS1646Δasd strain by electroporation and clonal selection on LB Amp plates, to produce strain YS1646Δasd-shTREX1. The YS1646Δasd mutants complemented with pATIU6-derived plasmids were able to grow on LB agar and liquid media in the absence of DAP.

[0978] In a subsequent iteration, the ampicillin resistance gene (Amp^{R}) from pATI-shTREX1 was replaced with a kanamycin resistance gene. This was accomplished by digestion of the pATI-shTREX1 plasmid with HindIII, followed by gel purification to remove the Amp^{R} gene. The kanamycin resistance (Kan^{R}) gene was amplified by PCR using primers APR-001 and APR-002 (SEQ ID NO:226 and SEQ ID NO:227, respectively), followed by digestion with HindIII, and ligation into the gel purified, digested pATIU6 plasmid.

[0979] In subsequent iterations, a single point mutation was introduced into the pATIKan plasmid at the pUC19 origin of replication, using the Q5® Site-Directed Mutagenesis Kit (New England Biolabs) and the primers APR-003 (SEQ ID NO:228) and APR-004 (SEQ ID NO:229), to change the nucleotide T at position 148 to a C. This mutation makes the origin of replication homologous to the pBR322 origin of replication, which is a low copy origin of replication, in order to reduce the plasmid copy number.

### Plasmid Maintenance Demonstrated In Vivo Using Asd Complementation System

[0980] In this example, CT26 tumor-bearing mice were treated with strain YS1646, containing a plasmid that expresses an shRNA targeting TREX1 (YS1646-shTREX1), or with an asd-deleted strain of YS1646, containing a plasmid with a functional asd gene and an shRNA targeting TREX1 (YS1646Δasd-shTREX1).

[0981] CT26 (Colon Tumor #26) is a tumor model that originated from exposing BALB/c mice to N-nitro-N-methylurethane (NMU), resulting in a highly metastatic carcinoma that recapitulates the aggressive, undifferentiated and checkpoint-refractory human colorectal carcinoma (see, e.g., Castle et al. (2014) BMC Genomics 15(1):190). When implanted subcutaneously in the flank, as opposed to orthotopically in the colon, the tumor immunophenotype is much more immunosuppressive and checkpoint refractory. While largely lacking in T-cell infiltration, the tumor is rich in myeloid cells, such as macrophages and myeloid-derived suppressor cells (MDSCs) (see, e.g., Zhao et al. (2017) Oncotarget 8(33):54775-54787). As this model more closely resembles human microsatellite stable (MSS) colorectal cancer, it is an ideal model to evaluate the therapeutic approach provided herein.

[0982] For this experiment, 6-8 week-old female BALB/c mice (3 mice per group) were inoculated subcutaneously (SC) in the right flank with CT26 (purchased from ATCC) tumor cells (2×10⁵ cells in 100 μL PBS). Mice bearing 8 day-old established flank tumors were intravenously (IV) injected with three doses of 5×10⁶ CFUs of the YS1646Δasd-shTREX1 strain, or the parental YS1646-shTREX1 strain, on days 8, 15, and 23. The plasmid encodes shTREX1 as an exemplary therapeutic product; any other desired therapeutic product or products can be substituted.

[0983] Body weights and tumors were measured twice weekly. Tumor measurements were performed using electronic calipers (Fowler, Newton, Mass.). Tumor volume was calculated using the modified ellipsoid formula, 1/2(length×width²). Mice were euthanized when tumor size reached >20% of body weight or became necrotic, as per IACUC regulations.

[0984] At 12 days after the final Salmonella injection, tumors were homogenized, and homogenates were serially diluted and plated on LB agar plates, to enumerate the total number of colony forming units (CFUs) present, or on LB plates containing kanamycin, to enumerate the number of kanamycin resistant colonies.

[0985] The results demonstrated that S. typhimurium strain YS1646-shTREX1 did not have selective pressure to maintain the shRNA plasmid, and demonstrated significant plasmid loss, as the percent of kanamycin resistant (Kan^{R}) colonies was less than 10%. The strain that used the asd gene complementation system for plasmid maintenance, YS1646Δasd-shTREX1, had nearly identical numbers of kanamycin resistant and kanamycin sensitive CFUs. These data demonstrate that the asd gene complementation system is sufficient to maintain the plasmid in the context of the tumor microenvironment in mice.

### Enhanced Anti-Tumor Efficacy Using Asd Complementation System

[0986] The asd complementation system is designed to prevent plasmid loss and potentiate the anti-tumor efficacy of the therapeutic product delivery by S. typhimurium strains in vivo. To test this, YS1646Δasd strains, containing the shTREX1 plasmid (YS1646Δasd-shTREX1), or scrambled control (YS1646Δasd-shSCR), that contain a functional asd gene cassette, were compared for anti-tumor efficacy in a murine colon carcinoma model, to strain YS1646 containing plasmid pEQU6-shTREX1 (YS1646-shTREX1), a plasmid that lacks an asd gene cassette, and therefore, does not have a mechanism for plasmid maintenance. shTREX1 is an exemplary therapeutic product.

[0987] For this experiment, 6-8 week-old female BALB/c mice (8 mice per group) were inoculated SC in the right flank with CT26 cells (2×10⁵ cells in 100 μL PBS). Mice bearing established flank tumors were IV injected twice, on day 8 and on day 18, with 5×10⁶ CFUs of strain YS1646Δasd-shTREX1, or strain YS1646-shTREX1, and compared to PBS control.

[0988] The YS1646-shTREX1 strain demonstrated enhanced tumor control compared to PBS (70% tumor growth inhibition (TGI), day 28) despite its demonstrated plasmid loss over time. The Δasd strain containing the plasmid with the asd gene complementation system and shTREX1 (YS1646Δasd-shTREX1) demonstrated superior tumor growth inhibition compared to PBS (82% TGI, p=0.002, day 25). These data demonstrate that improved potency is achieved by preventing plasmid loss, using the asd complementation system, and delivery of shTREX1, as compared to YS1646 containing plasmids without the asd gene complementation system. Thus, strains with asd complementation systems are superior anti-cancer therapeutics.

### Example 4

### S. typhimurium Flagellin Knockout by Deletion of the fliC and fljB Genes Strain Engineering and Characterization

[0989] In the example herein, the live attenuated S. typhimurium YS1646 strain containing the asd gene deletion was further engineered to delete the fliC and fljB genes, in order to remove both flagellin subunits. This eliminates pro-inflammatory TLR5 activation, in order to reduce pro-inflammatory signaling and improve anti-tumor adaptive immunity.

Deletion of fliC Gene

[0990] In this example, fliC was deleted from the chromosome of the YS1646Δasd strain using modifications of the method of Datsenko and Wanner (Proc. Natl. Acad. Sci. U.S.A. 97:6640-6645 (2000)), as described in detail in the previous example. Briefly, synthetic fliC gene homology arm sequences, that contained 224 and 245 bases of homologous sequence flanking the fliC gene, were cloned into a plasmid called pSL0147 (SEQ ID NO:230). A kanamycin gene cassette flanked by cre/loxP sites then was cloned into plasmid pSL0147, and the fliC gene knockout cassette was then PCR amplified with primers flic-1 (SEQ ID NO:232) and flic-2 (SEQ ID NO:233), gel purified, and then introduced into the YS1646Δasd strain carrying the temperature sensitive lambda red recombination plasmid pKD46, by electroporation. Electroporated cells were recovered in SOC+DAP medium, and plated onto LB agar plates supplemented with kanamycin (20 μg/mL) and diaminopimelic acid (DAP, 50 μg/mL). Colonies were selected and screened for insertion of the knockout fragment by PCR using primers flic-3 (SEQ ID NO:234) and flic-4 (SEQ ID NO:235). Plasmid pKD46 then was cured by culturing the selected kanamycin resistant strain at 42° C., and screening for loss of ampicillin resistance. The kanamycin resistance marker then was cured by electroporation of a temperature-sensitive plasmid expressing the Cre recombinase (pJW168), and Amp^{R} colonies were selected at 30° C.; pJW168 was subsequently eliminated by growing cultures at 42° C. Selected fliC knockout clones were then tested for loss of the kanamycin marker by PCR, using primers flanking the sites of disruption (flic-3 and flic-4), and evaluation of the electrophoretic mobility on agarose gels.

Deletion of fljB Gene

[0991] The fljB gene was then deleted from the YS1646Δasd/ΔfliC strain using modifications of the methods described above. Synthetic fljB gene homology arm sequences that contained 249 and 213 bases of the left hand and right hand sequence, respectively, flanking the fljB gene, were synthesized and cloned into a plasmid called pSL0148 (SEQ ID NO:231). A kanamycin gene cassette flanked by cre/loxP sites then was cloned into pSL0148, and the fljB gene knockout cassette was PCR amplified with primers fljb-1 (SEQ ID NO:236) and fljb-2 (SEQ ID NO:237) (see, Table 1), gel purified, and introduced into strain YS1646Δasd/ΔfliC carrying the temperature sensitive lambda red recombination plasmid pKD46, by electroporation. The kanamycin resistance gene then was cured by Cre-mediated recombination, as described above, and the temperature-sensitive plasmids were cured by growth at non-permissive temperature. The fliC and fljB gene knockout sequences were amplified by PCR using primers flic-3 and flic-4, or fljb-3 (SEQ ID NO:238) and fljb-4 (SEQ ID NO:239), respectively, and verified by DNA sequencing. This mutant derivative of strain YS1646 was designated YS1646Δasd/ΔfliC/ΔfljB, or YS1646Δasd/ΔFLG for short.

In Vitro Characterization of Engineered S. typhimurium Flagellin Knockout Strain

[0992] The YS1646-derived asd⁻ mutant strain harboring the deletions of both fliC and fljB, herein referred to as YS1646Δasd/ΔFLG, was evaluated for swimming motility by spotting 10 microliters of overnight cultures onto swimming plates (LB containing 0.3% agar and 50 mg/mL DAP). While motility was observed for the YS1646Δasd strain, no motility was evident with the YS1646Δasd/ΔFLG strain. The YS1646Δasd/ΔFLG strain then was electroporated with a plasmid containing an asd gene, and its growth rate in the absence of DAP was assessed. The YS1646Δasd/ΔFLG strain, with an asd complemented plasmid, was able to replicate in LB in the absence of supplemental DAP, and grew at a rate comparable to the YS1646Δasd strain containing an asd complemented plasmid. These data demonstrate that the elimination of flagellin does not decrease the fitness of S. typhimurium in vitro.

### Elimination of Flagella Decreases Pyroptosis in Murine Macrophages

[0993] 5×10⁵ mouse RAW macrophage cells (InvivoGen, San Diego, Ca.) were infected with the YS1646Δasd/ΔFLG strain, or the parental YS1646Δasd strain, both harboring an asd complemented plasmid, at an MOI of approximately 100, in a gentamicin protection assay. After 24 hours of infection, culture supernatants were collected and assessed for lactate dehydrogenase release as a marker of macrophage cell death, using a Pierce™ LDH Cytotoxicity Assay Kit (Thermo Fisher Scientific, Waltham, Ma.). The YS1646Δasd strain induced 75% maximal LDH release, while the YS1646Δasd/ΔFLG strain induced 54% maximal LDH release, demonstrating that deletion of the flagellin genes reduces the S. typhimurium-induced pyroptosis of infected macrophages.

### Flagella-Deleted Mutants Lead to Less Pyroptosis in Infected Human Monocytes

[0994] To demonstrate that the YS1646Δasd/ΔFLG strains are reduced in their ability to cause cell death in macrophages, THP-1 human macrophage cells (ATCC Catalog #202165) were infected with the S. typhimurium strains YS1646 and YS1646Δasd/ΔFLG, with the Δasd strain containing plasmids encoding a functional asd gene to ensure plasmid maintenance. 5×10⁴ cells were placed in a 96-well dish with DMEM and 10% FBS. Cells were infected with washed log-phase cultures of S. typhimurium for 1 hour at an MOI of 100 CFUs per cell, then the cells were washed with PBS, and the media was replaced with media containing 50 μg/mL gentamicin to kill extracellular bacteria, and 50 ng/mL of IFNγ to convert the monocytes into a macrophage phenotype. After 24 hours, the THP-1 cells were stained with CellTiter-Gb® reagent (Promega), and the percentage of viable cells was determined using a luminescent cell viability assay using a SpectraMax® M3 plate reader (Molecular Devices) to quantify the luminescence. The cells infected with the YS1646 strain had only 38% viability, while the cells infected with the YS1646Δasd/ΔFLG strain had 51% viability, indicating that the deletion of the flagellin genes induced less cell death of human macrophages, despite a very high and supraphysiological MOI.

Flagella is not Required for Tumor Colonization after Systemic Administration

[0995] To assess the impact of the flagellin knockout strains, administered in a murine model of colon carcinoma, 6-8 week-old female BALB/c mice (5 mice per group) were inoculated SC in the right flank with CT26 cells (2×10⁵ cells in 100 PBS). Mice bearing 10-day established flank tumors were IV injected with a single dose of 3×10⁵ CFUs of the YS1646Δasd/ΔFLG-shTREX1 strain, or the parental YS1646Δasd-shTREX1 strain. At day 35 post tumor implantation, mice were euthanized, and tumors were homogenized and plated on LB plates to enumerate the number of colony forming units (CFUs) per gram of tumor tissue. The YS1646Δasd-shTREX1 strain colonized tumors at a mean of 5.9×10⁷ CFUs per gram of tumor tissue, while the flagella-deleted YS1646Δasd/ΔFLG-shTREX1 strain colonized the tumors with almost a 2-fold increased mean of 1.1×10⁸ CFUs/g of tumor tissue. The splenic colonization of the YS1646Δasd-shTREX1 strain was calculated as a mean of 1.5×10³ CFU/g of spleen tissue, whereas splenic colonization of the flagella-deleted YS1646Δasd/ΔFLG-shTREX1 strain was slightly lower, at a mean of 1.2×10³ CFU/g of spleen tissue.

[0996] These data demonstrate that the absence of flagella not only does not negatively impact tumor colonization after IV administration, but it enhances tumor colonization compared to the flagella-intact strain. Importantly, deletion of the flagella slightly reduces splenic colonization, giving a tumor to spleen ratio of 100,000-fold. These data demonstrate that, contrary to the expectation from the art, not only are the flagella not required for tumor colonization, but their elimination enhances tumor colonization, while reducing splenic colonization.

### The Flagella-Deleted Strain Demonstrates Enhanced Anti-Tumor Activity in Mice

[0997] To assess the impact of the flagellin knockout strains, administered in a murine model of colon carcinoma, 6-8 week-old female BALB/c mice (5 mice per group) were inoculated SC in the right flank with CT26 cells (2×10⁵ cells in 100 PBS). Mice bearing established flank tumors were IV injected with a single dose of 3×10⁵ CFUs of the YS1646Δasd/ΔFLG-shTREX1 strain, or the YS1646Δasd-shTREX1 strain, and compared to PBS control. Mice were monitored by caliper measurements for tumor growth.

[0998] The results demonstrated that the YS1646Δasd/ΔFLG-shTREX1 strain, incapable of making flagella, showed enhanced tumor control compared to the parental YS1646Δasd-shTREX1 strain (27% TGI, day 24), and significant tumor control compared to the PBS control (73% TGI, p=0.04, day 24). These data demonstrate that, not only is the flagella not required for tumor colonization, but its loss can enhance anti-tumor efficacy.

### Flagella-Deleted Strains Demonstrate Enhanced Adaptive Immunity in a Murine Tumor Model

[0999] The impact of deletion of the flagellin on the immune response, and whether STING activation from tumor myeloid cell-delivery of shRNA to the STING checkpoint gene TREX1 would promote an adaptive type I IFN immune signature, was assessed. The CT26 murine model of colon carcinoma was used, where 6-8 week-old female BALB/c mice (5 mice per group) were inoculated SC in the right flank with CT26 cells (2×10⁵ cells in 100 μL PBS). Mice bearing established flank tumors were IV injected 11 days post tumor implantation with 5×10⁶ CFUs of the YS1646Δasd/ΔFLG-shTREX1 strain, or the parental YS1646Δasd-shTREX1, or the scrambled plasmid control strain, YS1646Δasd-shSCR, and compared to PBS control. Mice were bled 7 days post dosing on Sodium Heparin coated tubes (Becton Dickinson). Non-coagulated blood was then diluted in the same volume of PBS and peripheral blood mononuclear cells (PBMCs) were separated from the interphase layer of whole blood using Lympholyte®-M cell separation reagent (Cedarlane). Isolated PBMCs were washed with PBS+2% FBS by centrifugation at 1300 RPM for 3 minutes at room temperature, and resuspended in flow buffer. One million PBMCs were seeded per well of a V-bottom 96-well plate. Cells were centrifuged at 1300 RPM for 3 minutes at room temperature (RT) and resuspended in 100 μL of flow buffer containing fluorochrome-conjugated AH1 peptide:MHC class I tetramers (MBL International), and the cell surface flow cytometry antibodies CD4 FITC clone RM4-5; CD8a BV421 clone 53-6.7; F4/80 APC clone BM8; CD11b PE-Cy7 clone M1/70; CD45 BV570 clone 30-F11; CD3 PE clone 145-2C11; Ly6C BV785 clone HK1.4; I-A/I-E APC-Cy7 clone M5/114.15.2; Ly6G BV605 clone 1A8; and CD24 PercP-Cy5.5 clone M1/69 (all from BioLegend), for 45 minutes at room temperature and in the dark. After 45 minutes, the cells were washed twice with PBS+2% FBS by centrifugation at 1200 RPM for 3 minutes. The cells were then resuspended in PBS+2% FBS containing DAPI (4′,6-diamino-2-phenylindole; dead/live stain), and data were immediately acquired using the NovoCyte® flow cytometer (ACEA Biosciences, Inc.), and analyzed using FlowJo™ software (Tree Star, Inc.).

[1000] The following cell types were enumerated as a percentage of total live cells: CD11b⁺ Gr1⁺ neutrophils (possibly MDSCs, although further phenotyping in an ex vivo functional assay would be required), CD11b⁺ F4/80⁺ macrophages, CD8⁺ T-cells, and CD8⁺ T-cells that recognize the CT26 tumor rejection antigen gp70 (AH1), the product of the envelope gene of murine leukemia virus (MuLV)-related cell surface antigen (see, e.g., Castle et al. (2014) BMC Genomics 15(1):190).

[1001] The results, which are summarized in the table below, show that the YS1646Δasd-shSCR strain, containing a plasmid encoding a non-specific scrambled shRNA, elicits the typical anti-bacterial immune profile of significantly increased neutrophils, as compared to PBS (p=0.02), to the flagella-intact YS1646Δasd-shTREX1 strain (p=0.02), and to the flagella-deleted strain YS1646Δasd/ΔFLG-shTREX1 (p=0.01), which had the lowest levels of circulating neutrophils. Similarly, bacterially-induced macrophages also were significantly elevated in the YS1646Δasd-shSCR strain, as compared to PBS (p=0.01), to the YS1646Δasd-shTREX1 strain (p=0.01), and to YS1646Δasd/ΔFLG-shTREX1 strain (p=0.01). Thus, both strains carrying type I IFN-inducing payloads were capable of overwriting the normal anti-bacterial immune response, which clears bacterial infections through neutrophils and macrophages, and does not induce adaptive T-cell-mediate immunity. However, while the overall circulating levels of CD8⁺ T-cells were similar across all groups, the flagella-deleted YS1646Δasd/ΔFLG-shTREX1 strain demonstrated significantly increased percentages of AH1-tetramer⁺ CD8⁺ T-cells, as compared to PBS (p=0.04).

[1002] These data demonstrate the feasibility of engineering a bacteria to deliver viral-like type I IFN-inducing plasmids to tumor-resident myeloid cells. This results in a dramatic reprogramming of the immune response towards a more viral, and less bacterial, immune profile. Deletion of the flagella further enhanced the shift away from bacterially-recruited neutrophils and macrophages, and towards significantly increased tumor antigen-specific CD8⁺ T-cells. Thus, eliminating bacterial TLR5-mediated inflammation can enhance adaptive immunity.

| | % Live Cells Mean ± SD | | | |
|---|---|---|---|---|
| | | YS1646Δasd- | YS1646Δasd- | YS1646Δasd/ |
| Immune Cells | PBS | shSCR | shTREX1 | ΔFLG-shTREX1 |
| Neutrophils | 6.27 ± 2.62 | 19.21 ± 9.46 | 5.87 ± 3.94 | 4.01 ± 1.65 |
| Macrophages | 10.08 ± 2.11 | 23.14 ± 9.04 | 9.12 ± 3.84 | 7.39 ± 2.11 |
| CD8⁺ T-Cells | 6.64 ± 0.56 | 7.17 ± 0.60 | 7.14 ± 2.30 | 6.44 ± 1.43 |
| AH1⁺ CD8⁺ T-Cells | 0.83 ± 0.12 | 1.06 ± 1.11 | 2.27 ± 1.44 | 4.12 ± 3.08 |

SD = Standard deviation

### Flagella-Deleted Strains are Restricted to the Phagocytic Myeloid Immune Cell Compartment In Vivo

[1003] According to the literature, ΔfljB/ΔfliC strains demonstrate suppression of many downstream genes associated with SPI-1-mediated entry into non-phagocytic cells. In order to determine whether the YS1646Δasd/ΔFLG strain also is deficient for non-phagocytic cell uptake, a YS1646Δasd/ΔFLG strain, constitutively expressing mCherry (a red fluorescent protein) under the bacterial rpsM promoter, was IV administered to MC38 subcutaneous flank tumor-bearing mice.

[1004] The MC38 (murine colon adenocarcinoma #38) model was derived similarly as the CT26 model using mutagenesis, but with dimethylhydralazine, and in a C57BL/6 mouse strain (see, e.g., Corbett et al. (1975) Cancer Res. 35(9):2434-2439). Similarly to CT26, subcutaneous implantation results in a more T-cell excluded and immunosuppressive tumor microenvironment than when implanted orthotopically in the colon (see, e.g., Zhao et al. (2017) Oncotarget 8(33):54775-54787). MC38 has a higher mutational burden than CT26, and a similar viral-derived gp70 antigen (p15E) that can be detected by CD8⁺ T-cells, although it is not considered a rejection antigen. While variants of MC38 have been found to be partially responsive to checkpoint therapy, most variants of the cell line are considered checkpoint refractory and T-cell excluded (see, e.g., Mariathasan et al. (2018) Nature 555:544-548), including the MC38 cells used herein.

[1005] For this experiment, 6-8 week-old female C57BL/6 mice (5 mice per group) were inoculated SC in the right flank with MC38 cells (5×10⁵ cells in 100 μL PBS). Mice bearing large established flank tumors were IV injected on day 34 with 1×10⁶ CFUs of the YS1646Δasd/ΔFLG-mCherry strain. Tumors were resected 7 days post IV-dosing, and cut into 2-3 mm pieces into gentleMACS™ C tubes (Miltenyi Biotec) filled with 2.5 mL enzyme mix (RPMI-1640 containing 10% FBS with 1 mg/mL Collagenase IV, and 20 μg/mL DNase I). The tumor pieces were dissociated using OctoMACS™ (Miltenyi Biotec) specific dissociation program (mouse implanted tumors), and the whole cell preparation was incubated with agitation for 45 minutes at 37° C. After the 45 minute incubation, a second round of dissociation was performed using the OctoMACS™ (mouse implanted tumor) program, and the resulting single cell suspensions were filtered through a 70 μM nylon mesh into a 50 mL tube. The nylon mesh was washed once with 5 mL of RPMI-1640+10% FBS, and the cells were filtered a second time using a new 70 μM nylon mesh into a new 50 mL tube. The nylon mesh was washed with 5 mL of RPMI-1640+10% FBS, and the filtered cells were then centrifuged at 1000 RPM for 7 minutes. The resulting dissociated cells were resuspended in PBS and kept on ice before the staining process.

[1006] For the flow-cytometry staining, 100 μL of the single cell suspensions were seeded in wells of a V-bottom 96-well plate. PBS containing a dead/live stain (Zombie Aqua™, BioLegend), and Fc Blocking reagents (BD Biosciences), were added at 100 μL per well and the cells were incubated on ice for 30 minutes in the dark. After 30 minutes, the cells were washed twice with PBS+2% FBS by centrifugation at 1300 RPM for 3 minutes. Cells were then resuspended in PBS+2% FBS containing fluorochrome-conjugated antibodies (CD4 FITC clone RM4-5; CD8a BV421 clone 53-6.7; F4/80 APC clone BM8; CD11b PE-Cy7 clone M1/70; CD45 BV570 clone 30-F11; CD3 PE clone 145-2C11; Ly6C BV785 clone HK1.4; I-A/I-E APC-Cy7 clone M5/114.15.2; Ly6G BV605 clone 1A8; and CD24 PercP-Cy5.5 clone M1/69, all from BioLegend), and incubated on ice for 30 minutes in the dark. After 30 minutes, the cells were washed twice with PBS+2% FBS by centrifugation at 1300 RPM for 3 minutes, and resuspended in flow cytometry fixation buffer (Thermo Fisher Scientific). Flow cytometry data were acquired using the NovoCyte® Flow Cytometer (ACEA Biosciences, Inc.), and analyzed using the FlowJo™ software (Tree Star, Inc.).

[1007] The results demonstrated that 7.27% of tumor-infiltrating monocytes had taken up the flagella-deleted mCherry strain in the tumor microenvironment. Similarly, 8.96% of the tumor-associated macrophage (TAM) population, and 3.33% of the tumor-infiltrating dendritic cells (DCs) had taken up the flagella-deleted mCherry strain. In contrast, within the CD45⁻ population, corresponding to stromal and tumor cells, only 0.076% showed positivity for mCherry expression (compared to 0.067% background staining). These data demonstrate that the flagella, and its downstream signaling impact on SPI-1, are necessary to enable epithelial cell infectivity, and that the lack thereof restricts uptake of the bacteria to only the phagocytic immune cell compartment of the tumor microenvironment (i.e., tumor-resident immune/myeloid cells).

[1008] Deletion of the flagella confers multiple benefits to the immunostimulatory S. typhimurium strain, including eliminating TLR5-induced inflammatory cytokines that suppress adaptive immunity, reducing macrophage pyroptosis, as well as maintaining (or enhancing) tumor-specific enrichment upon systemic administration, where uptake is confined to tumor-resident phagocytic cells.

### Example 5

### Salmonella pagP Gene Knockout Strain Engineering and Characterization

[1009] In this example, the YS1646Δasd/ΔFLG strain was further modified to delete pagP. The pagP gene is induced during the infectious life cycle of S. typhimurium, and encodes an enzyme (lipid A palmitoyltransferase) that modifies lipid A with palmitate. In wild-type S. typhimurium, expression of pagP results in a lipid A molecule that is hepta-acylated. In an msbB⁻ mutant, in which the terminal acyl chain of lipid A cannot be added, the expression of pagP results in a hexa-acylated lipid A molecule. LPS with hexa-acylated lipid A has been shown to be highly pro-inflammatory, and to have a high affinity for TLR4 (hepta-acylated lipid, found in wild-type, has the highest affinity for TLR4). In this example, a strain deleted of pagP and msbB can produce only penta-acylated lipid A, allowing for lower pro-inflammatory cytokines due to low affinity for TLR4, enhanced tolerability, and increased adaptive immunity when the bacteria are engineered to deliver plasmids encoding immunomodulatory proteins.

ΔpagP Strain Construction

[1010] The pagP gene was deleted from the YS1646Δasd/ΔFLG strain using modifications of the methods described in the preceding examples. Synthetic pagP gene homology arm sequences that contain 203 and 279 bases of the left hand and right hand sequence, respectively, flanking the pagP gene, were synthesized and cloned into a plasmid called pSL0191 (SEQ ID NO:331). A kanamycin gene cassette flanked by cre/loxP sites then was cloned into pSL0191, and the pagP gene knockout cassette was PCR amplified with primers pagp-1 (SEQ ID NO:315) and pagp-2 (SEQ ID NO:316) (see, Table 1), gel purified, and introduced into strain YS1646Δasd/ΔFLG, carrying the temperature sensitive lambda red recombination plasmid pKD46, by electroporation. The kanamycin resistance gene then was cured by Cre-mediated recombination, as described above, and the temperature-sensitive plasmids were cured by growth at non-permissive temperature. The pagP gene knockout sequences were amplified by PCR using primers pagp-3 (SEQ ID NO:317) and pagp-4 (SEQ ID NO:318), and verified by DNA sequencing. The resulting mutant derivative of YS1646 was designated YS1646Δasd/ΔFLG/ΔpagP.

pagP Deletion Mutants have LPS with Penta-Acylated Lipid A, and Induce Reduced Inflammatory Cytokines

[1011] The pagP gene also was deleted from the YS1646Δasd strain using the lambda-derived Red recombination system, as described in Datsenko and Wanner (Proc. Natl. Acad. Sci. U.S.A. 97:6640-6645 (2000)) and above, to generate the strain YS1646Δasd/ΔpagP. This strain was then electroporated with a plasmid containing a functional asd gene, to complement the deleted asd gene and to ensure plasmid maintenance in vivo. The lipid A was then extracted from this strain and evaluated by Matrix-Assisted Laser Desorption/Ionization Mass Spectrometry (MALDI MS) and compared to lipid A from the wild-type S. typhimurium strain ATCC 14028, the YS1646 strain (which is deleted for msbB and purI), and the YS1646Δasd strain. Wild-type Salmonella had a minor lipid A peak with a mass of 2034, and a major peak with a mass of 1796, corresponding to the hepta-acylated and hexa-acylated species, respectively, due to the presence of a functional msbB gene. The msbB-deleted strains, YS1646 and YS1646Δasd, had major peaks at 1828 and 1585, corresponding to a mixture of hexa-acylated and penta-acylated lipid A. The msbB and pagP deleted strain, YS1646Δasd/ΔpagP, had only a single peak with a mass of 1585, corresponding to penta-acylated lipid A. These data demonstrate that deletion of pagP prevents palmitoylation of the lipid A, thereby restricting it to a single penta-acylated species.

[1012] To determine whether the LPS with the penta-acylated lipid A from the ΔpagP mutant strains reduced TLR4 signaling, 4 μg of purified LPS from the wild-type strain, the YS1646 strain, or the YS1646Δasd/ΔpagP strain, was added to THP-1 human monocytic cells (ATCC Catalog # TIB-202), and the supernatants were evaluated 24 hours later for the presence of inflammatory cytokines using a Cytometric Bead Array (CBA) kit (BD Biosciences). The results showed that LPS from the YS1646Δasd/ΔpagP strain induced 25% of the amount of TNFα, compared to wild-type LPS, and induced 7-fold less IL-6 than wild-type LPS. The LPS from the YS1646Δasd/ΔpagP strain induced 22-fold less IL-6 than strain YS1646, demonstrating that the penta-acylated LPS species from a ΔpagP mutant is significantly less inflammatory in human cells, and indicating that the ΔpagP mutant would be better tolerated in humans.

Deletion of pagP Induces Significantly Less IL-6 in Primary Human M2 Macrophages

[1013] To demonstrate that the YS1646Δasd/ΔFLG/ΔpagP strain also elicits less inflammatory and dose-limiting IL-6 from primary human M2 macrophages, the strain was evaluated, and compared with the YS1646Δasd/ΔFLG and the parental YS1646 strains. The M2 macrophages derived from human donors are representative of the immunosuppressive phenotypes that are highly enriched in T-cell excluded solid tumors. Frozen human PBMCs, isolated from healthy human donors, were thawed in complete medium (RPMI-1640+1× non-essential amino acids +5% human AB serum), and washed by centrifugation for 10 minutes at 800 RPM at room temperature. PBMCs were resuspended in PBS+2% FBS, and monocytes were negatively isolated using a CD16 depletion kit (StemCell Technologies). Isolated untouched monocytes were then washed by centrifugation in PBS+2% FBS and resuspended in complete medium containing 100 ng/mL human macrophage colony-stimulating factor (M-CSF) and 10 ng/mL human IL-4. Isolated monocytes (3e5 per well) were then seeded in a 24-well plate with a final volume of 750 μL. Two days after seeding, the cell culture media was entirely aspirated and replaced with fresh complete medium containing 100 ng/mL human M-CSF and 10 ng/mL human IL-4. Two days later (on day 4), 500 μL of complete medium containing 100 ng/mL human M-CSF and 10 ng/mL human IL-4 was added per well for 48 hours. On day 6, the cell culture media was entirely aspirated and replaced with fresh complete medium without cytokines, alone, or with media containing the log-phase cultures of the S. typhimurium strains at an MOI of 20. Cells were infected for 1 hour, then washed with PBS, and the media was replaced with fresh media containing 50 μg/mL gentamicin to kill extracellular bacteria. The wells were then washed and replaced with fresh media and allowed to incubate at 37° C. and 5% CO₂. After 48 hours, supernatants were harvested and assayed for cytokines using a human IL-6 cytometric bead array (CBA) kit (BD Biosciences), according to the manufacturer's instructions.

[1014] The results demonstrated that secreted IL-6 levels from human primary M2 macrophages, infected with parental strain YS1646, yielded an average of 14839±926 pg/mL, while the IL-6 levels from the YS1646Δasd/ΔFLG strain were significantly lower, at 2075±723 pg/mL (p=0.004). This further affirms the impact that the deletion of flagella, and elimination of TLR5 signaling, has on the induction of IL-6. The YS1646Δasd/ΔFLG/ΔpagP strain elicited the lowest IL-6 levels, at 332±100 pg/mL, demonstrating the reduced ability of this modified LPS coating to stimulate TLR4, and the resulting dramatically reduced inflammatory IL-6 production.

The Combined Flagella and pagP Deletions Significantly Enhance Tolerability in Mice

[1015] To determine whether the modified strains described above are more attenuated than parental strain YS1646, a median lethal dose (LD50) study was conducted. 6-8 week-old BALB/c mice (5 mice per group) were injected intravenously with a dose range of 3e5 to 3e7 CFUs of strain YS1646, or the derivative strains YS1646Δasd/ΔFLG, YS1646Δasd/ΔpagP, and YS1646Δasd/ΔFLG/ΔpagP. Unlike strain YS1646, the derivative strains also carried a plasmid encoding murine IL-2, an FDA-approved cytokine that has demonstrated significant toxicity when systemically administered.

[1016] The LD50 for strain YS1646 was found to be 4.4×10⁶ CFUs (average of two studies), in line with previously published LD50 reports of YS1646, and a >1000-fold improvement compared to wild-type S. typhimurium (see, e.g., Clairmont et al. (2000) J. Infect. Dis. 181:1996-2002). The LD₅₀ for the YS1646Δasd/ΔFLG strain was determined to be 2.07×10⁷ CFUs, demonstrating a greater than 4.5-fold reduction in virulence compared to strain YS1646. The LD₅₀ for the YS1646Δasd/ΔpagP strain was determined to be 1.39×10⁶ CFUs, demonstrating at least a 3.2-fold reduction in virulence compared to strain YS1646, which is expected, given that the strain still has highly inflammatory flagella. The LD₅₀ for the YS1646Δasd/ΔFLG/ΔpagP strain could not be established, as no mice died at the highest dose given, but was >6.2×10⁷ CFUs. The YS1646Δasd/ΔFLG/ΔpagP strain therefore demonstrates a >14-fold reduction in virulence compared to parental YS1646 strain. These data demonstrate that the genetic modifications described above reduce the virulence of the clinical S. typhimurium strain, YS1646 (also known as VNP20009), and therefore, lead to increased tolerability in humans.

[1017] In the Phase I clinical trial of VNP20009 (see, e.g., Toso et al. (2002) J. Clin. Oncol. 20(1):142-152), the presence of the bacteria in patients' tumors only partially was observed at the two highest doses tested, 3×10⁸ CFU/m² (33% presence), and 1×10⁹ CFU/m² (50% presence), indicating that the tolerable dose of VNP20009 was too low to achieve tumor colonization. By improving the tolerability of the strains through the modifications described above, >14-fold higher doses can be administered, if necessary, improving the percentage of patients whose tumors will be colonized, and increasing the level of therapeutic colonization per tumor, thereby solving the observed problems with VNP20009.

The Combined Flagella and pagP Deletions Significantly Limit the Generation of Anti-S. typhimurium Antibodies in Mice

[1018] The surviving mice from the 3×10⁶ CFU dosing group described above (N=5, except for N=4 in the YS1646 dosing group) were kept for 40 days post IV-dosing, at which time they were bled for serum, and assessed for antibody titers to S. typhimurium, by a modified flow-based antibody titering system. Overnight cultures of the YS1646Δasd/ΔFLG-mCherry strain were washed and fixed with flow cytometry fixation buffer. Sera from the previously-treated mice, and from naïve control mice, were seeded in a 96-well plate, and serial dilutions were performed in PBS. Next, 25 μL of the YS1646Δasd/ΔFLG-mCherry cultures, containing 1×10⁶ CFUs, were added to the sera and incubated for 25 minutes at room temperature. The bacteria were then washed twice with PBS by spinning them at 4000 RPM for 5 minutes. After the last wash, the bacteria were resuspended in PBS containing a secondary Goat anti-Mouse Fc AF488 antibody (1/400 dilution from stock), and incubated for 25 minutes at room temperature and protected from light. The bacteria were then washed three times with PBS by spinning them at 4000 RPM for 5 minutes. After the last wash, the bacteria were resuspended in PBS, and data were acquired using the NovoCyte® flow cytometer (ACEA Biosciences, Inc.), and analyzed using the MFI FlowJo™ software (Tree Star, Inc.).

[1019] To evaluate the results by flow cytometry, the highest dilution with signal in all groups was chosen (the 1250× serum dilution), and the corresponding mean fluorescence intensity (MFI) values were plotted. The limit of detection (LOD) was chosen at an MFI of 1000, as that is the MFI obtained without staining, as well as with background staining with Goat anti-Mouse Fc AF488 antibody only. Therefore, an MFI greater than 1000 was considered a positive signal, and everything equal to or under this value was considered a negative result, despite having an MFI value. The results of this assay revealed a high MFI titer of anti-S. typhimurium serum antibodies from mice treated with 3×10⁶ CFUs of the YS1646 strain (MFI of 29196.3±20730), in line with previously published data that YS1646 is able to generate serum antibodies (that are non-neutralizing). Fewer antibodies were detected in the mice treated with the YS1646Δasd/ΔFLG strain (MFI of 11257±9290), which can be due to the lack of adjuvant activity from the flagella. In the mice treated with the YS1646Δasd/ΔpagP strain, significantly fewer antibodies were generated (MFI of 4494±3861), as compared to strain YS1646 (p=0.033), which can be due to the altered LPS surface coating. The most significant reduction in serum antibodies was demonstrated in the YS1646Δasd/ΔFLG/ΔpagP treatment group (MFI of 1930±2445), where several of the mice had MFI titers under 1000, and were thus considered negative for serum antibodies (p=0.021, vs. strain YS1646). Thus, the combined deletions of the flagella and the pagP gene enable both improved safety, as well as significantly reduced immunogenicity, which will enable repeat dosing of high CFUs in humans.

pagP and Flagella Deleted Strains, and their Combination, Demonstrate Significantly Higher Viability in Human Serum Compared to Strain YS1646

[1020] Strain YS1646 exhibits limited tumor colonization in humans after systemic administration. It is shown herein that strain YS1646 is inactivated by complement factors in human blood. To demonstrate this, strains YS1646 and E. coli D10B were compared to exemplary immunostimulatory bacteria provided herein, that contain additional mutations that alter the surface of the bacteria. These exemplary modified strains were YS1646Δasd/ΔpagP, YS1646Δasd/ΔFLG, and YS1646Δasd/ΔFLG/ΔpagP. These three strains, in addition to YS1646 and E. coli D10B cultures, were incubated with serum, or with heat-inactivated (HI) serum, from either pooled mouse blood, or pooled healthy human donors (n=3), for 3 hours at 37° C. After incubation with serum, bacteria were serially diluted and plated on LB agar plates, and the colony forming units (CFUs) were determined.

[1021] In mouse serum, all strains remained 100% viable and were completely resistant to complement inactivation. In human serum, all strains were 100% viable in the heat-inactivated serum. The E. coli D10B strain was completely eliminated after 3 hours in whole human serum. In whole human serum, the YS1646 strain exhibited only 6.37% of live colonies, demonstrating that tumor colonization of the YS1646 clinical strain was limited due to complement inactivation in human blood. For the YS1646Δasd/ΔFLG strain, 31.47% of live colonies remained, and for the YS1646Δasd/ΔpagP strain, 72.9% of live colonies remained, after incubation with human serum for 3 hours. The combined YS1646Δasd/ΔFLG/ΔpagP strain was completely resistant to complement in human serum.

[1022] These data explain why strain YS1646 (VNP20009) has very low tumor colonization when systemically administered. It is shown herein that strain YS1646 is highly sensitive to complement inactivation in human serum, but not in mouse serum. These data explain why limited tumor colonization was observed in humans, while mouse tumors were colonized at a high level. The fljB/fliC or pagP deletions, or the combination of these mutations, partially or completely rescues this phenotype. Thus, the enhanced stability observed in human serum with the YS1646Δasd/ΔpagP, YS1646Δasd/ΔFLG, and YS1646Δasd/ΔFLG/ΔpagP strains provides for increased human tumor colonization.

### Example 6

### Salmonella ansB Gene Knockout Strain Engineering and Characterization

[1023] In this example, the YS1646Δasd/ΔFLG/ΔpagP strain was further modified to delete ansB, the gene encoding bacterial L-asparaginase II. Secretion of L-asparaginase II by S. typhimurium in the presence of T-cells has been shown to directly impair T-cell function, by reducing T-cell receptor (TCR) expression and impairing cytolytic cytokine production. As a result, bacterially-derived asparaginases have been successfully used to treat acute lymphoblastic leukemia (ALL) for decades. Deletion of ansB from the bacterial genome eliminates the ability of the S. typhimurium strain to produce L-asparaginase II, thereby enhancing the function of T-cells in the bacterially-colonized tumor microenvironment.

ΔansB Strain Construction

[1024] The ansB gene was deleted from the YS1646Δasd/ΔFLG/ΔpagP strain using modifications of the methods described in the preceding examples. Synthetic ansB gene homology arm sequences that contained 236 and 251 bases of the left hand and right hand sequence, respectively, flanking the ansB gene, were synthesized and cloned into a plasmid called pSL0230 (SEQ ID NO:332). A kanamycin gene cassette flanked by cre/loxP sites then was cloned into plasmid pSL0230, and the ansB gene knockout cassette was PCR amplified with primers ansb-1 (SEQ ID NO:319) and ansb-2 (SEQ ID NO:320), gel purified, and introduced into strain YS1646Δasd/ΔFLG/ΔpagP, carrying the temperature sensitive lambda red recombination plasmid pKD46, by electroporation. The kanamycin resistance gene then was cured by Cre-mediated recombination, as described above, and the temperature-sensitive plasmids were cured by growth at non-permissive temperature. The ansB gene knockout sequences were amplified by PCR using primers ansb-3 (SEQ ID NO:321) and ansb-4 (SEQ ID NO:322) (see, Table 1), and verified by DNA sequencing. The resulting mutant derivative of YS1646 was designated YS1646Δasd/ΔFLG/ΔpagP/ΔansB.

Deletion of ansB Eliminates Asparaginase Activity In Vitro

[1025] In order to determine whether the YS1646Δasd/ΔFLG/ΔpagP/ΔansB strain produced less L-asparaginase II, cultures of this strain, along with the ansB-intact YS1646Δasd/ΔFLG/ΔpagP strain, were grown in LB and allowed to reach stationary phase. At this time, 50 μL of conditioned media from the cultures was analyzed for asparaginase activity, using a colorimetric Asparaginase assay kit (Sigma-Aldrich), per the manufacturer's instructions. After a 40 minute incubation, the absorbance units were read on a SpectraMax® M3 Spectrophotometer (Molecular Devices) at an absorbance wavelength of 570 nm.

[1026] Compared to the recombinant L-asparaginase II positive control, which gave an absorbance of 1.95, the absorbance of the ansB-intact YS1646Δasd/ΔFLG/ΔpagP strain was 0.82. Deletion of ansB, in the YS1646Δasd/ΔFLG/ΔpagP/ΔansB strain, however, resulted in background levels of asparaginase activity, detected at an absorbance of 0.109. These data confirm that the ΔansB mutation completely eliminates asparaginase activity.

Deletion of ansB Restores T-Cell Function in an In Vitro Co-Culture Assay

[1027] In order to functionally characterize the ansB-deleted strain for the impact of reduced L-asparaginase II activity on T-cells, a co-culture assay was established using strain-infected murine primary bone marrow-derived macrophages (BMMs), in culture with splenic purified T-cells. For this assay, spleens from healthy BALB/c mice were isolated and dissociated, and splenic CD4⁺ and CD8⁺ T-cells were isolated using a mouse T-cell isolation kit (StemCell Technologies), per the manufacturer's instructions. From the isolated T-cells, 2e5 cells were added per well to a Flat-bottom 96-well plate that had been previously coated with 5 μg/ml of an anti-mouse CD3c antibody (clone 145-2C11, Thermo Fisher Scientific). Conditioned LB media from the YS1646Δasd/ΔFLG/ΔpagP and YS1646Δasd/ΔFLG/ΔpagP/ΔansB cultures, grown to stationary phase, were filtered through a 0.45 μM nylon mesh and added to the T-cells, with or without the addition of 10 μg/ml of an agonistic anti-CD28 antibody for co-stimulation. Control groups containing recombinant asparaginase at 20 U/mL, and normal culture media, were used as controls in the assay. The plate was incubated at 37° C. in a 5% CO₂ incubator. At 24 hours post-incubation, 100 μL of the co-culture supernatants were harvested from the wells, and a murine Th1-specific cytokine bead array (CBA, BioLegend) was performed. Concurrently, T-cells were harvested and analyzed for surface T-cell receptor β (TCRβ) expression on CD4⁺ and CD8⁺ T-cells by flow cytometry, as well as for intracellular staining of IFNγ, TNFα, and IL-2.

[1028] The results confirmed that the ansB-intact strain (YS1646Δasd/ΔFLG/ΔpagP) used to infect the macrophages, and subsequently co-cultured with T-cells, induces profound T-cell immunosuppression. This was exhibited by marked downregulation of TCRβ surface expression in both CD4⁺ and CD8⁺ T-cells (see table below), compared to media control, and to the positive control of recombinant asparaginase at a concentration of 20 U/mL. Deletion of ansB in the YS1646Δasd/ΔFLG/ΔpagP/ΔansB strain significantly restored TCRβ surface expression in both CD4⁺ (p=0.004) and CD8⁺ T-cells (p=0.002), as compared to the parental YS1646Δasd/ΔFLG/ΔpagP strain.

TCRβ Expression (MFI Mean ± SD)

| Treatment | CD4⁺ T-Cells | CD8⁺ T-Cells |
|---|---|---|
| Media control | 8141.0 ± 405.9 | 12655.0 ± 534.6 |
| Strain YS1646Δasd/ | 3817.0 ± 200.8 | 6492.0 ± 260.2 |
| ΔFLG/ΔpagP | | |
| Strain YS1646Δasd/ | 7047.5 ± 204.4 | 13350.0 ± 339.4 |
| ΔFLG/ΔpagP/ΔansB | | |
| Recombinant | 4253.5 ± 576.3 | 6305.0 ± 687.3 |
| asparaginase II | | |
| (20 U/mL) | | |

SD = Standard deviation

[1029] T-cell secretion of cytokines, 24 hours after co-culture, was measured as a marker of T-cell cytolytic function. As shown in the table below, T-cell production of the cytokines IFNγ, TNFα, and IL-2 was markedly lower after treatment with the YS1646Δasd/ΔFLG/ΔpagP strain, as compared to the media control, and was significantly restored by ansB deletion in the YS1646Δasd/ΔFLG/ΔpagP/ΔansB strain (IFNγ (p=0.05), TNFα (p=0.012), and IL-2 (p=0.006)). These data indicate that deletion of ansB in the YS1646Δasd/ΔFLG/ΔpagP/ΔansB strain significantly restores T-cell cytolytic function, as compared to the parental YS1646Δasd/ΔFLG/ΔpagP strain.

| | T-Cell Cytokine Expression (pg/mL, Mean ± SD) | | |
|---|---|---|---|
| Treatment | IFNγ | TNFα | IL-2 |
| Media control | 4176.1 ± 20.8 | 136.0 ± 11.1 | 3118.2 ± 154.3 |
| YS1646Δasd/ | 238.1 ± 0.6 | 35.7 ± 7.1 | 134.9 ± 12.7 |
| ΔFLG/ΔpagP | | | |
| YS1646Δasd/ | 1788.9 ± 515.5 | 120.5 ± 11.2 | 1947.6 ± 190.5 |
| ΔFLG/ΔpagP/ | | | |
| ΔansB | | | |
| Recombinant | 166.2 ± 19.7 | 33.2 ± 3.4 | 114.5 ± 4.8 |
| asparaginase II | | | |
| (20 U/mL) | | | |

SD = Standard deviation

Deletion of ansB Restores Tumor-Resident T-Cell TCRβ Expression In Vivo

[1030] In in vitro co-culture assays, expression of ansB demonstrated immunosuppressive effects on T-cell function, including downregulation of TCRβ on T-cells by flow cytometry. In order to assess whether this would similarly occur in vivo, the MC38 mouse model of colorectal cancer was utilized.

[1031] For this experiment, 6-8 week-old female C57BL/6 mice (4 mice per group) were inoculated SC in the right flank with MC38 cells (5×10⁵ cells in 100 μL PBS). Mice bearing large established flank tumors were IV injected on day 17 with 1×10⁷ CFUs of the YS1646Δasd/ΔFLG-mCherry strain. Tumors were resected 7 days post IV dosing and cut into 2-3 mm pieces into gentleMACS™ C tubes (Miltenyi Biotec) filled with 2.5 mL enzyme mix (RPMI-1640 containing 10% FBS with 1 mg/mL Collagenase IV and 20 μg/mL DNase I). The tumor pieces were dissociated using OctoMACS™ (Miltenyi Biotec) specific dissociation program (mouse implanted tumors), and the whole cell preparation was incubated with agitation for 45 minutes at 37° C. After 45 minutes of incubation, a second round of dissociation was performed using the OctoMACS™ (mouse implanted tumor) program, and the resulting single cell suspensions were filtered through a 70 μM nylon mesh into a 50 mL tube. The nylon mesh was washed once with 5 mL of RPMI-1640+10% FBS, and the cells were filtered a second time using a new 70 μM nylon mesh, into a new 50 mL tube. The nylon mesh was washed with 5 mL of RPMI-1640+10% FBS, and the filtered cells were then centrifuged at 1000 RPM for 7 minutes. The resulting dissociated cells were resuspended in PBS and kept on ice before the staining process.

[1032] For the flow-cytometry staining, 100 μL of the single cell suspensions were seeded in wells of a V-bottom 96-well plate. PBS containing a dead/live stain (Zombie Aqua™, BioLegend) and Fc Blocking reagents (BD Biosciences) were added at 100 μL per well, and the cells were incubated on ice for 30 minutes in the dark. After 30 minutes, the cells were washed twice with PBS+2% FBS by centrifugation at 1300 RPM for 3 minutes. Cells were then resuspended in PBS+2% FBS containing fluorochrome-conjugated antibodies (CD45 BV570 clone 30-F11; TCRβ PE clone H57-597; and CD4 FITC clone RM4-5; all from BioLegend) and DAPI (BioLegend), and incubated on ice for 30 minutes in the dark. After 30 minutes, the cells were washed twice with PBS+2% FBS by centrifugation at 1300 RPM for 3 minutes, and resuspended in flow cytometry fixation buffer (Thermo Fisher Scientific). Flow cytometry data were acquired using the ACEA NovoCyte® flow cytometer (ACEA Biosciences, Inc.), and analyzed using the FlowJo™ software (Tree Star, Inc.).

[1033] As shown in the table below, the average mean fluorescence intensity (MFI) for the surface expression of TCRβ on tumor-infiltrating CD4⁺ T-cells, following their interaction within tumors with the colonized parental YS1646Δasd/ΔFLG/ΔpagP strain, was significantly lower than with the ansB-deleted YS1646Δasd/ΔFLG/ΔpagP/ΔansB strain (p=0.042), which was higher than even the PBS control-treated mice.

| | MFI for TCRβ Expression on Tumor- | | |
|---|---|---|---|
| | Infiltrating CD4⁺ T-Cells | | |
| | | | YS1646Δasd/ |
| | | YS1646Δasd/ | ΔFLG/ΔpagP/ |
| | PBS | ΔFLG/ΔpagP | ΔansB |
| | 13980 | 13933 | 14412 |
| | 14543 | 13480 | 14957 |
| | 14177 | 12087 | 14844 |
| | 13931 | 14010 | 14233 |
| AVG | 14157.8 | 13377.5 | 14611.5 |
| SD | 278.0 | 891.5 | 344.7 |

MFI = mean fluorescence intensity;
AVG = average;
SD = standard deviation

[1034] Taken together, these data confirm the necessity of deleting the ansB gene in order to restore T-cell function, due to the bacterial production of immunosuppressive L-asparaginase II, and demonstrate the enhanced T-cell function observed with the ansB deletion in the YS1646Δasd/ΔFLG/ΔpagP/ΔansB strain.

### Example 7

### Salmonella csgD Gene Knockout Strain Engineering and Characterization

[1035] The YS1646Δasd/ΔFLG/ΔpagP/ΔansB strain was further modified to delete csgD, a master gene that controls S. typhimurium curli fimbriae formation, cellulose production, and c-di-GMP production. The csgD gene deletion eliminates the possibility of cellulose-mediated biofilm formation, reduces pro-inflammatory signaling, and enhances uptake by host phagocytic cells. This increase in intracellular localization would thereby enhance the effectiveness of plasmid delivery and immunomodulatory protein production.

ΔcsgD Strain Construction

[1036] The csgD gene was deleted from the YS1646Δasd/ΔFLG/ΔpagP/ΔansB strain, using modifications of the methods described in the preceding examples. Synthetic csgD gene homology arm sequences that contained 207 and 209 bases of the left hand and right hand sequence, respectively, flanking the csgD gene, were synthesized and cloned into a plasmid called pSL0196 (SEQ ID NO:333). A kanamycin gene cassette flanked by cre/loxP sites then was cloned into plasmid pSL0196, and the csgD gene knockout cassette was PCR amplified with primers csgd-1 (SEQ ID NO:323) and csgd-2 (SEQ ID NO:324), gel purified, and introduced into strain YS1646Δasd/ΔFLG/ΔpagP ansB, carrying the temperature sensitive lambda red recombination plasmid pKD46, by electroporation. The kanamycin resistance gene then was cured by Cre-mediated recombination, as described above, and the temperature-sensitive plasmids were cured by growth at non-permissive temperature. The csgD gene knockout sequences were amplified by PCR, using primers csgd-3 (SEQ ID NO:325) and csgd-4 (SEQ ID NO:326), and verified by DNA sequencing. The resulting mutant derivative of parental strain YS1646 was designated YS1646Δasd/ΔFLG/ΔpagP/ΔansB/ΔcsgD.

csgD-Deleted Strains Cannot Form RDAR Colonies on Congo Red Plates

[1037] Congo Red agar plates were prepared with The ability to form Rough Dry And Red (RDAR) colonies after growth on Congo Red plates is a well-validated assay for bacterial biofilm formation. The Rough and Dry texture occurs through cellulose production, and the red is due to the accumulation of pigment by the curli fimbriae surface structures. For this assay, the YS1646Δasd/ΔFLG/ΔpagP/ΔansB strain was compared to the YS1646Δasd/ΔFLG/ΔpagP/ΔansB/ΔcsgD strain for the ability to form the RDAR phenotype after incubation on Congo Red agar plates.

[1038] Congo Red agar plates were prepared with soytone (10 g/L) and yeast extract (5 g/L) (modified LB without NaCl), and complemented with Congo red (40 mg/L) and Coomassie brilliant blue G-250 (20 mg/L). Five microliters of a stationary phase bacterial culture was spotted onto Congo Red plates, and incubated at 37° C. for 16 hours, then transferred to 30° C. and incubated for an additional 120 hours. Visual analysis of colony morphology and color was performed and recorded daily to confirm presence or absence of the RDAR colony morphotype.

[1039] Comparing the colony morphotypes between the two strains, the YS1646Δasd/ΔFLG/ΔpagP/ΔansB/ΔcsgD strain had a smooth phenotype, and the colonies lacked pigment. In comparison, the YS1646Δasd/ΔFLG/ΔpagP/ΔansB strain, still containing the csgD gene, exhibited the classic rough and dry appearance, and clear evidence of pigment uptake. Thus, the functional assay confirms that the ΔcsgD strain is unable to form biofilms, as it lacks curli fimbriae and cellulose production.

csgD-Deleted Strains Demonstrate Superior Anti-Tumor Efficacy in a Highly Refractory Mouse Model of Triple Negative Breast Cancer

[1040] The impact of the csgD deletion in models where the immunostimulatory bacterial therapy colonizes tumors, but has shown limited efficacy, was assessed. This can indicate the presence of bacterially-produced cellulose that can limit uptake into tumor-resident myeloid cells, thereby limiting therapeutic benefit (see, e.g., Crull et al. (2011) Cellular Microbiology 13(8):1223-1233). The difficult-to-treat EMT6 model was utilized, which is a representative model of human triple negative breast cancer (see, e.g., Yu et al. (2018) PLoS ONE 13(11):e0206223). When EMT6 tumor cells are administered orthotopically into the mammary fat pad, as opposed to subcutaneously in the flank, the model is T-cell excluded, highly metastatic, and highly refractory to immunotherapy, including to all approved checkpoint antibodies (see, e.g., Mariathasan et al. (2018) Nature 554:544-548).

[1041] For this experiment, 6-8 week-old female BALB/c mice (5 mice per group) were inoculated in the left mammary fat pad with EMT6 tumor cells (ATCC # CRL-2755) (2×10⁵ cells in 100 μL PBS). Mice bearing 13 day-old established mammary tumors (˜55 mm³ in volume) were IV injected with a single dose of 1×10⁷ CFUs of the csgD-deleted YS1646Δasd/ΔFLG/ΔpagP/ΔansB/ΔcsgD strain, or the parental YS1646Δasd/ΔFLG/ΔpagP/ΔansB strain, and compared to PBS control. The bacterial strains contained a plasmid encoding a constitutively active murine STING (EF-1α muSTING R283G).

[1042] The tumors in the PBS-treated mice grew evenly, reaching a max tumor volume at day 35 (1199.0±298.1 mm³). Mice treated with the csgD-intact strain, YS1646Δasd/ΔFLG/ΔpagP/ΔansB, did not demonstrate evidence of anti-tumor efficacy in this model, also reaching max tumor volume at day 35 (1689.1±537.0). Ex vivo LB plating of these tumors revealed all tumors to be colonized. However, the csgD-deleted strain, YS1646Δasd/ΔFLG/ΔpagP/ΔansB/ΔcsgD, resulted in 3 out of 5 mice being completely cured of both their primary and any metastatic disease (day 60+). Overall tumor growth inhibition (TGI) was 45.7%, with one of the other two remaining tumors partially responding before eventually growing out. The two bacterial strains contained the same plasmid payload, yet only one demonstrated significant anti-tumor efficacy. Thus, in one of the most intractable and highly metastatic syngeneic tumor models, orthotopic EMT6, a strain with a csgD deletion was able to induce systemic anti-tumor efficacy, and result in 60% complete responses.

csgD-Deleted Strains Demonstrate Enhanced Intracellular Uptake In Vivo

[1043] In order to determine whether the csgD-deleted strain demonstrated improved efficacy because of greater bacterial uptake into tumor-resident myeloid cells, an ex vivo gentamicin protection assay was performed (see, e.g., Crull et al. (2011) Cellular Microbiology 13(8):1223-1233). For this experiment, 6-8 week-old female C57BL/6 mice (4 mice per group) were inoculated SC in the right flank with MC38 cells (5×10⁵ cells in 100 μL PBS). Mice bearing large established flank tumors were IV injected on day 17 with 1×10⁷ CFUs of the csgD-deleted YS1646Δasd/ΔFLG/ΔpagP/ΔansB/ΔcsgD strain (N=12), or the parental YS1646 strain (N=4). Tumors were resected 7 days post IV dosing, weighed, and minced in RPMI supplemented with 1 mg/mL collagenase IV and 20 mg/mL DNase I, and incubated with shaking at 37° C. for 30 minutes, to generate a single cell suspension. After 30 minutes, the suspension was passed through a 70 mm filter, and the recovered volume was divided into two separate, identical samples. Gentamicin (Thermo Fisher Scientific) was added at a concentration of 200 mg/mL to one of each of the paired samples to kill extracellular bacteria, and the samples were incubated with shaking at 37° C. for 90 minutes. Cell suspension samples were then washed and lysed with 0.05% Triton X, and plated on LB agar plates to enumerate for CFUs.

[1044] The results demonstrate that, compared to the CFUs from YS1646-treated tumors without gentamicin treatment (11925±19859 CFUs), gentamicin treatment resulted in very few CFUs detected from the tumors (51±45 CFUs). This indicates that the bacteria reside largely extracellularly in these tumors, and are thus sensitive to gentamicin elimination. In the csgD-deleted YS1646Δasd/ΔFLG/ΔpagP/ΔansB/ΔcsgD treatment group, the non-gentamicin treated tumors yielded high CFUs, as expected from well-colonized tumors, and treatment with gentamicin yielded less CFUs (1276±2410 CFUs), and much more than in the parental YS1646 strain-treated tumors. This is due to more of the csgD-deleted bacteria residing intracellularly, and thus, being protected from gentamicin. These data demonstrate that the csgD deletion improves intracellular uptake of the bacteria, which can enhance plasmid delivery of immunomodulatory proteins in vivo.

### Example 8

### pATI-1.75 Vector Construction

[1045] A plasmid (pATI-1.75) was designed and synthesized that contains the following features: a pBR322 origin of replication, the asd gene, a kanamycin resistance gene flanked by HindIII sites for curing, and a multiple cloning site for expression cassette insertion. The expression cassette is composed of multiple elements, including eukaryotic promoters, open reading frames (ORFs), post-transcriptional regulatory elements, and polyadenylation signals, that are assembled in various configurations.

[1046] Exemplary promoters include the human cytomegalovirus (CMV) immediate early core promoter encoded directly downstream of the CMV immediate early enhancer sequence, and the core promoter for human elongation factor-1 alpha (EF-1α). Open reading frames (ORFs) can include one or more sequences that each are translated into a protein, and can be separated into distinct polypeptides by insertion of a 2A sequence, whereby eukaryotic ribosomes fail to insert a peptide bond between Gly and Pro residues within the 2A sequence. Examples of 2A sequences are the T2A peptide (see, e.g., SEQ ID NO:327) from the Thosea asigna virus (TaV) capsid protein, and the P2A peptide (see, e.g., SEQ ID NO:328) from porcine teschovirus (PTV). Upstream furin cleavage sites (RRKR), and other enhancer elements, are placed upstream to facilitate cleavage to separate the expressed proteins.

[1047] Examples of post-transcriptional regulatory elements (PREs) include the Woodchuck Hepatitis virus PRE (WPRE; SEQ ID NO:346), and the Hepatitis B virus PRE (HPRE; SEQ ID NO:347), which increase accumulation of the cytoplasmic mRNA of a gene by promoting mRNA nuclear export to the cytoplasm, enhancing 3′ end processing and stability. Examples of polyadenylation signal sequences include the SV40 polyadenylation (SV40polyA, or SV40pA) signal, and the bovine growth hormone (bGH) polyadenylation (bGHpolyA, or bGHpA) signal, both of which are 3′ regulatory elements that serve to promote transcriptional termination, and contain the sequence motif recognized by the RNA cleavage complex.

### Example 9

### Designed Heterologous Protein Expression Plasmids Induce Functional Protein Production from Human Cells

### Optimal Expression of Cytokines Established in Human Cells

[1048] In order to exemplify that immunostimulatory cytokines can be expressed from designed plasmids in human cells, a panel of cytokines were cloned into the pATI-1.75 plasmid, under the control of the EF-1α promoter. The cytokines include, but are not limited to, murine IL-2 (muIL-2), muIL-12p70, muIL-23, and human IL-2 (huIL-2). For the muIL-15 Receptor-α fused to an IL-15 single chain (muIL-15Rα-IL-15sc), an EF-1α and CMV promoter were tested. HEK293T STING Null cells (InvivoGen) were seeded in 24-well plates coated with poly-L-lysine at 200,000 cells per well, overnight at 37° C. in a 5% CO₂ incubator, to achieve 80% confluency. The following day, 200 ng of each cytokine plasmid DNA was diluted in serum-free media and added to FuGENE® transfection reagent (Promega), at the proper reagent:DNA ratios, with untransfected wells as negative controls (in duplicates). Cell culture supernatants from each sample were collected at 24 hours post-transfection, and assessed for protein expression by ELISAs specific for each cytokine.

[1049] The muIL-2 construct was evaluated in a murine IL-2 ELISA (R&D Systems), according to the manufacturer's instructions, and an additional version of muIL-2 with codon optimization (muIL-2 CO) also was evaluated. Concentrations of neat supernatant were tested, and yielded an average of 1680 pg/mL of muIL-2 for the muIL-2 construct, and 1812 pg/mL of muIL-2 for the muIL-2 CO construct. These data confirmed the functionality of the constructs, and demonstrated that yield could be improved with codon optimization. The muIL-12p70 construct was evaluated in a murine IL-12 ELISA (R&D Systems), according to the manufacturer's protocol. When supernatants were added neat, a mean of 400 pg/mL of secreted muIL-12p70 was measured, although this was outside the linear range. When the supernatants were diluted 5-fold, an average of 105 pg/mL of secreted muIL-12p70 was detected. For the muIL-23 plasmid, detection of protein was achieved using the murine IL-23 ELISA (BioLegend), per kit instructions. With the supernatant added neat, a mean of 966 pg/mL of muIL-23 was detected. For the human IL-2 plasmid, detection of protein was achieved using the human IL-2 ELISA (Invitrogen), per kit instructions. With the supernatant added neat, an average of 1422 pg/mL of huIL-2 was detected. For the muIL-15Rα-IL-15sc construct, expressed using either the EF-1α or CMV promoters, the murine IL-15 ELISA (eBioscience, Inc.) was used, per kit instructions. When added neat, the muIL-15Rα-IL-15sc plasmid with the EF-1α promoter resulted in an average of 131 pg/mL, while the muIL-15Rα-IL-15sc plasmid with the CMV promoter resulted in an average of 289 pg/mL.

[1050] These data validate the plasmid expression constructs encoding immunomodulatory cytokines, both mouse and human, in human cells. Further, they indicate that codon optimization, and the use of promoters such as CMV, can enhance protein expression.

### Post-Transcriptional Regulatory Elements Enhance Cytokine Expression

[1051] In order to determine whether post-transcriptional regulatory elements (PREs), added at the 3′ end of the ORF, enhance expression of immunostimulatory cytokines in human cells, expression of huIL-2, under the control of the EF-1α promoter, was tested with or without the addition of a Woodchuck Hepatitis virus post-transcriptional regulatory element (WPRE) in the pATI-1.75 plasmid.

[1052] HEK293T STING Null cells (InvivoGen) were seeded in 24-well plates coated with poly-L-lysine at 200,000 cells per well, overnight at 37° C. in a 5% CO₂ incubator, to achieve 80% confluency. The following day, 200 ng of each cytokine plasmid DNA was diluted in serum-free media and added to FuGENE® transfection reagent (Promega), at the proper reagent:DNA ratios, with untransfected wells as negative controls (in duplicates). Cell culture supernatants from each sample were collected at 24 hours post-transfection and assessed for activity by a human IL-2 ELISA (Invitrogen), according to the manufacturer's instructions. Supernatants were added neat, or were diluted 5-fold.

[1053] The results demonstrated that, when supernatant was added neat, compared to the huIL-2 construct without a WPRE, which secreted an average of 1540 pg/mL, the huIL-2 construct with the WPRE secreted 5511 pg/mL, a 3.6-fold increase. In the 5-fold diluted supernatants, the non-WPRE huIL-2 construct secreted 315 pg/mL of huIL-2, while the huIL-2 construct with the WPRE secreted 1441 pg/mL, a 4.6-fold increase. Thus, addition of 3′ post-transcriptional regulatory elements, exemplified by, but not limited to, WPRE, can significantly improve protein expression in human cells.

### Promoter Optimization and Post-Transcriptional Regulatory Elements Enhance Cytokine Production in Primary M2 Macrophages

[1054] While expression of cytokines, such as muIL-15Rα-IL-15sc, was enhanced in human HEK293T cells by use of the CMV promoter, it was determined whether expression of cytokines could similarly be enhanced in donor-derived primary human M2 macrophages, the predominant macrophage phenotype in T-cell excluded, solid human tumors. Additionally, it was determined whether post-transcriptional regulatory elements, such as WPRE, could enhance expression in these cells.

[1055] In order to determine if protein expression could be improved, the promoters EF-1α and CMV were tested for controlling expression of muIL-2, and the WPRE post-transcriptional regulatory element was tested for expression of huIL-2. Frozen human PBMCs, isolated from healthy human donors, were thawed in complete medium (RPMI-1640+1× non-essential amino acids +5% Human AB serum), and washed by centrifugation for 10 minutes at 800 RPM at room temperature. PBMCs were resuspended in PBS+2% FBS, and monocytes were negatively isolated using a CD16 depletion kit (StemCell Technologies). The isolated monocytes were cultured for 6 days in RPMI media containing M-CSF and IL-4, to generate M2 macrophages. For this, isolated untouched monocytes were washed by centrifugation in PBS+2% FBS, and resuspended in complete medium containing 100 ng/mL human M-CSF and 10 ng/mL human IL-4. Isolated monocytes (3e5 per well) were then seeded in a 24-well plate with a final volume of 750 microliters. Two days after the seeding, the cell culture media was entirely aspirated and replaced with fresh complete medium containing 100 ng/mL human M-CSF and 10 ng/mL human IL-4. Two days later (on day 4), 500 μL of complete medium, containing 100 ng/mL human M-CSF and 10 ng/mL human IL-4, was added per well, and incubated for 48 hours. On day 6, the cell culture media was entirely aspirated, and replaced with fresh complete medium without cytokines, for transfection with the Viromer® RED mRNA and plasmid transfection reagent (Lipocalyx).

[1056] Transfection with Viromer® RED was performed according to the manufacturer's instructions. Briefly, 500 ng of plasmid DNA, containing the EF-1α-muIL-2 construct, the CMV-muIL-2 construct, the EF-1α-huIL-2 construct, or the EF-1α-huIL-2+WPRE construct, as well as untransfected control, were diluted in the provided buffer, and mixed with 0.2 μL of Viromer® RED, and incubated at room temperature for 15 minutes to allow the DNA/Viromer® RED complexes to form. The DNA/Viromer® RED complexes were then slowly added to each well of the 24-well plate (in duplicates), and the plate was incubated at 37° C. in a CO₂ incubator for 24 hours. Supernatants were harvested at 24 hours, and assayed for cytokines using either a murine IL-2 ELISA (R&D Systems), or a human IL-2 ELISA (Invitrogen), per kit instructions.

[1057] The results demonstrated that expression of muIL-2 from neat supernatants harvested from primary human M2 macrophages, transfected with the muIL-2 construct under control of the EF-1α promoter, resulted in the secretion of an average of 59.7 pg/mL muIL-2. The muIL-2 construct with the CMV promoter yielded an average of 275 pg/mL muIL-2, an almost 5-fold increase. For the human IL-2 ELISA, neat supernatants from the cells transfected with the plasmid lacking the WPRE yielded an average of 170 pg/mL huIL-2. The huIL-2 construct containing the WPRE yielded an average of 219 pg/mL huIL-2. These data confirm that promoters such as CMV, and post-transcriptional regulatory elements such as WPRE, can significantly improve cytokine expression in multiple cells types, including primary human M2 macrophages.

Co-Stimulatory Receptor Ligand 4-1BBL Expressed from Human Cells

[1058] Co-stimulatory molecules, such as 4-1BBL, when expressed on antigen-presenting cells (APCs), can engage 4-1BB expressed on T-cells to promote optimal T-cell function. 4-1BBL is negatively regulated by its cytoplasmic signaling domain. In the late-phase of 4-1BBL ligation of macrophages to T-cells, reverse signaling of the 4-1BBL cytoplasmic domain induces surface translocation of 4-1BBL to bind and form a signaling complex with TLR4. This induces high levels of TNF-α, comparable to LPS activation of TLR4, that leads to immunosuppression of the adaptive immune response (see, e.g., Ma et al. (2013) Sci. Signal. 6(295):ra87).

[1059] In this example, the sequence encoding murine 4-1BBL was cloned into the pATI-1.75 vector. In order to maximally engage T-cells, the reverse signaling of the 4-1BBL cytoplasmic domain was eliminated by deleting the cytoplasmic domain (corresponding to amino acid residues 1-82 of SEQ ID NO:344), generating mu4-1BBLΔcyt. To determine whether mu4-1BBLΔcyt could be functionally expressed on the surface of human cells, HEK-293T cells were utilized. HEK293T STING Null cells (InvivoGen) were seeded in 24-well plates coated with poly-L-lysine at 200,000 cells per well, overnight at 37° C. in a CO₂ incubator, to achieve 80% confluency. The following day, 200 ng of plasmid DNA, encoding mu4-1BBLΔcyt, was diluted in serum-free media and added to FuGENE® transfection reagent (Promega), at the proper reagent:DNA ratio, with untransfected wells as a negative control (in duplicates). After 48 hours, the cells were washed twice with PBS+2% FBS by centrifugation at 1300 RPM for 3 minutes. The cells were then resuspended in PBS+2% FBS, and stained with a PE-conjugated murine anti-4-1BBL antibody (clone TKS-1, BioLegend) and DAPI (dead/live stain). After 30 minutes, the cells were washed twice with PBS+2% FBS by centrifugation at 1300 RPM for 3 minutes, and resuspended in PBS+2% FBS. Flow cytometry data were acquired using the ACEA NovoCyte® flow cytometer (ACEA Biosciences, Inc.), and analyzed using the FlowJo™ software (Tree Star, Inc.).

[1060] As a percentage of live cells, the untransfected control cells showed a percent positive staining for murine 4-1BBL of 14.6. In comparison, 93.4% of the cells that were transfected with the plasmid encoding mu4-1BBLΔcyt, were positive for surface expression of 4-1BBL. These data demonstrate that the pATI-1.75 plasmid can effectively be used to express 4-1BBL at high levels on the surface of human cells.

Soluble TGFβ Receptor II Expressed from Human Cells

[1061] Soluble mouse TGFβ receptor II variants were designed by removing the cytoplasmic and transmembrane portions of the full TGFβ receptor II. Additionally, either a FLAG or Fc tag was added for detection. These variants were cloned into the pATI-1.75 vector under the control of a CMV promoter and a 3′ WPRE. The sequences were confirmed by Sanger sequencing. 1.5×10⁶ HEK293T cells were plated one day prior on 6-well plates coated with poly-L-lysine, to achieve 80% confluency. On the day of transfection, 3 μg of DNA was diluted in serum-free media and added to FuGENE® transfection reagent (Promega) at the proper reagent:DNA ratios. Cell culture supernatants from each sample were collected after 48 hours of incubation. Some supernatant was concentrated in a 10 kDa spin column (Millipore). Direct ELISAs with mouse TGF-β1 (R&D systems) were performed on the supernatant of transfected HEK293T cells. ELISA data, with absorbance at 450 nm, is provided in the table below.

| Construct | Absorbance at 450 nm |
|---|---|
| Concentrated soluble mouse TGFβ receptor II Fc | 1.522 ± 0.025 |
| Soluble mouse TGFβ receptor II Fc | 1.508 ± 0.018 |
| Media (control) | 0.041 ± 0.002 |

[1062] The functionality of these constructs was tested in a T-cell assay. Mouse T-cells were harvested from the spleen using a magnetic isolation kit (StemCell Technologies). T-cells were incubated with anti-mouse CD3c antibody, with or without the soluble receptor, at various concentrations of mouse TGF-beta. T-cell activation was quantified using the mouse TH1 CBA kit (BioLegend), and flow cytometry labeling of CD4, CD8, 4-1BB, and CD69.

[1063] These data demonstrate the ability to express heterologous molecules, such as extracellular receptors fused to an Fc domain, from the plasmid engineered for delivery by the immunostimulatory bacteria to eukaryotic, such as human, cells.

Expression of a CD3×CD19 Bispecific T-cell Engager from Human Cells

[1064] A CD3×CD19 bispecific T-cell engager (BiTE®), containing a FLAG tag and a His tag, was cloned into the pATI-1.75 vector, under the control of a CMV promoter and with a 3′ WPRE. The sequences were confirmed by Sanger sequencing. 1.5×10⁶ HEK293T cells were plated one day prior on 6-well plates coated with poly-L-lysine, to achieve 80% confluency. On the day of transfection, 3 μg of DNA was diluted in serum-free media and added to FuGENE® transfection reagent (Promega) at the proper reagent:DNA ratios. Cell culture supernatants from each sample were collected after 48 hours of incubation. Some supernatant was concentrated in a 10 kDa spin column (Millipore).

[1065] The functionality of this construct was tested by binding of the CD3×CD19 BiTE® to Raji and Jurkat-Lucia™ NFAT cells (InvivoGen). The BiTE® was detected using an anti-FLAG-APC (BioLegend), using flow cytometry. One well of 50,000 cells was run for each condition. The mean fluorescence intensity (MFI) of the APC positive events, and the number of cells gated as APC positive, are provided in the table below.

| | | Mean Fluorescence |
|---|---|---|
| | Number of | Intensity (MFI) of |
| Sample | APC⁺ Cells | APC⁺ Cells |
| Raji cells with anti-FLAG-APC | 41 | 1439 |
| only | | |
| Raji cells with CD3 × CD19 | 10307 | 7408 |
| BiTE ® | | |
| Raji cells with concentrated | 11248 | 16045 |
| CD3 × CD19 BiTE ® | | |
| Jurkat cells with anti-FLAG-APC | 100 | 1519 |
| only | | |
| Jurkat cells with CD3 × CD19 | 18482 | 4584 |
| BiTE ® | | |
| Jurkat cells with concentrated | 17563 | 14089 |
| CD3 × CD19 BiTE ® | | |

[1066] Additionally, this construct was tested in a co-culture of Raji and Jurkat-Lucia™ NFAT cells. Cells were incubated with or without the CD3×CD19 BiTE®, and the luminescence (corresponding to Lucia™ luciferase activity resulting from NFAT activation) was detected at 6 hours and 24 hours post-addition of BiTE®. The luminescence readings of this assay are provided in the table below.

| | Concentrated | | |
|---|---|---|---|
| | CD3 × CD19 | CD3 × CD19 | |
| | BiTE ® | BiTE ® | Medium |
| Experimental | (Lumines- | (Lumines- | (Lumines- |
| Conditions | cence) | cence) | cence) |
| 2 Raji: 1 | 12110.5 ± 837.9 | 3445.0 ± 717.0 | 44.5 ± 10.6 |
| Jurkat, 6 hour | | | |
| time point | | | |
| 1 Raji: 1 | 4337.0 ± 219.2 | 2057.5 ± 20.5 | 26.0 ± 15.6 |
| Jurkat, 6 hour | | | |
| time point | | | |
| 2 Raji: 1 | 47159.5 ± 1038.7 | 11274 ± 408.7 | 114.5 ± 57.3 |
| Jurkat, 24 hour | | | |
| time point | | | |
| 1 Raji: 1 | 18614 ± 1540.1 | 6017 ± 31.1 | 122 ± 15.6 |
| Jurkat, 24 hour | | | |
| time point | | | |

[1067] These data demonstrate the ability to express heterologous molecules, such as scFvs, alternative antibody constructs, and bispecific T-cell engagers, in eukaryotic, such as human, cells, from the engineered plasmid that can be delivered by the immunostimulatory bacteria herein.

### Example 10

### Immunostimulatory Bacterial Strains Efficiently Deliver Plasmids and Express Cytokines in Human Cells

### Flagella-Deleted Strains Containing Plasmids Encoding Murine IL-2 Induce Functional IL-2 Protein Expression Following Infection in Human Monocytes

[1068] As described above, the flagellin genes, fljB and fliC, were deleted from the YS1646 strain of S. typhimurium with the asd gene deleted, generating the strain YS1646Δasd/ΔFLG. This strain was electroporated with a plasmid containing an expression cassette with the EF-1α promoter and the murine cytokine IL-2 (muIL-2). In addition, the YS1646Δasd/ΔFLG strain was electroporated with an expression plasmid encoding murine IL-156, as a control for a non-cognate cytokine. Additional constructs were created using the CMV promoter.

[1069] To determine whether these strains containing expression plasmids can infect human monocytes and induce the production of murine IL-2, THP-1 human monocytic cells were plated at 50,000 cells/well in RPMI 1640 (Gibco™)+10% Nu-Serum™ (Corning®), one day prior to infection. The cells were infected with the various strains at an MOI of 50 for one hour in RPMI, then washed 3 times with PBS, and resuspended in RPMI+100 μg/mL gentamicin (Sigma). Supernatants were collected 48 hours later from a 96-well plate, and assessed for the concentration of murine IL-2 by ELISA (R&D Systems).

[1070] The concentration of muIL-2 detected in the YS1646Δasd/ΔFLG-IL-156 control wells was very low (6.52 pg/mL), as expected, and likely reflective of some cross-reactivity to the endogenous human IL-2 receptor. In contrast, the YS1646Δasd/ΔFLG-muIL-2 strain induced an average of 35.1 pg/mL of muIL-2. These data demonstrate the feasibility of expressing and secreting functional heterologous proteins, such as IL-2, from the S. typhimurium immunomodulatory platform strains, in human monocytes.

Flagella-Deleted and pagP-Deleted Strains, Containing Plasmids Encoding Murine IL-2, Demonstrate Enhanced IL-2 Expression, Compared to Transfected muIL-2 DNA, in Primary Human M2 Macrophages

[1071] The relative efficiencies of transfection (i.e., direct transfer of plasmid DNA) vs. bactofection (i.e., transfer of plasmid DNA by the immunostimulatory bacterial strains herein), in primary human M2 macrophages, for expression of muIL-2, were compared. Frozen human PBMCs, isolated from healthy human donors, were thawed in complete medium (RPMI-1640+1× non-essential amino acids +5% Human AB serum), and washed by centrifugation for 10 minutes at 800 RPM at room temperature. PBMCs were resuspended in PBS+2% FBS, and monocytes were negatively isolated using a CD16 depletion kit (StemCell Technologies). Isolated untouched monocytes were then washed by centrifugation in PBS+2% FBS, and resuspended in complete medium containing 100 ng/mL human M-CSF and 10 ng/mL human IL-4. Isolated monocytes (3e5 per well) were then seeded in a 24-well plate, with a final volume of 750 microliters. Two days after the seeding, the cell culture media was entirely aspirated and replaced with fresh complete medium containing 100 ng/mL human M-CSF and 10 ng/mL human IL-4. Two days later (on day 4), 500 μL of complete medium, containing 100 ng/mL human M-CSF and 10 ng/mL human IL-4, was added per well, and incubated for 48 hours. On day 6, the cell culture media was entirely aspirated, and replaced with fresh complete medium without cytokines, for transfection with Viromer® RED mRNA and plasmid transfection reagent (Lipocalyx).

[1072] Transfection with Viromer® RED was performed according to the kit instructions. Briefly, 500 ng of plasmid DNA from the constructs encoding muIL-2 under control of the EF-1α promoter (EF-1α-muIL-2), or under control of the CMV promoter (CMV-muIL-2), or untransfected control, were diluted in the provided buffer, mixed with 0.2 μL of Viromer® RED transfection reagent, and incubated at room temperature for 15 minutes to allow the DNA/Viromer® RED complexes to form. The DNA/Viromer® RED complexes were then slowly added to each well of the 24-well plate containing the monocytes (in duplicates), and the plate was incubated at 37° C. in a CO₂ incubator for 24 hours. Additional wells of cells were infected at an MOI of 450 with the YS1646Δasd/ΔFLG/ΔpagP strain containing the EF-1α-muIL-2 construct, or the YS1646Δasd/ΔFLG/ΔpagP strain containing the CMV-muIL-2 construct, for one hour in RPMI, then washed 3 times with PBS, and resuspended in RPMI+100 μg/mL gentamicin (Sigma).

[1073] After 24 hours, the cells were lysed with 350 μL Buffer RLT with β-mercaptoethanol (β-ME) (Qiagen), and RNA extraction was performed using the Qiagen RNeasy® Mini Kit with the following modifications. A genomic DNA elimination step, using an RNase-Free DNase kit (Qiagen) was included in the kit to remove genomic DNA from the total RNA. Total RNA concentration was measured using a NanoDrop™ One UV-Vis Spectrophotometer (Thermo Fisher Scientific). The purity of each sample also was assessed from the A260/A230 absorption ratio. RNA was stored at −80° C. without freeze-thawing until reverse-transcription was performed. cDNA synthesis was performed using 0.4-1 μg of template RNA using a C1000 Touch Thermal Cycler (Bio-Rad) and SuperScript™ VILO™ Master Mix (Invitrogen) in a 30 μL reaction, according to the manufacturer's instructions.

[1074] qPCR (quantitative polymerase chain reaction) was performed with a CFX96™ Real-Time PCR Detection System (Bio-Rad). SYBR® primers for murine IL-2 (Assay ID: qMmuCED0060978) were purchased from Bio-Rad. The qPCR reaction (20 μL) was conducted per protocol, using the iTaq™ Universal SYBR® Green Supermix (Bio-Rad). The standard thermocycling program on the Bio-Rad CFX96™ Real-Time System consisted of a 95° C. denaturation for 30 seconds, followed by 40 cycles of 95° C. for 5 seconds and 60° C. for 30 seconds. Reactions with template-free control were included for each set of primers on each plate. All samples were run in duplicate, and the mean C_{q} values were calculated. Quantification of the target mRNA was normalized using Gapdh (glyceraldehyde-3-phosphate dehydrogenase) reference mRNA (Bio-Rad, Assay ID: qMmuCED0027497). ΔC_{q} was calculated as the difference between target (mu-IL2) and reference (Gapdh) gene. ΔΔC_{q} was obtained by normalizing the ΔC_{q} values of the treatments, to the ΔC_{q} values of the non-treatment controls. Fold increase was calculated as 2\hat{ }-ΔΔC_{q}. The fold increases relative to untransfected/uninfected control are shown in the table below.

| Treatment Group | Fold Increase in muIL-2 |
|---|---|
| YS1646 | <1 |
| YS1646Δasd/ΔFLG/ΔpagP, | 74 |
| EF-1α-muIL-2 (infection) | |
| YS1646Δasd/ΔFLG/ΔpagP, | 668.2 |
| CMV-muIL-2 (infection) | |
| Transfection, EF-1α-muIL-2 | 249.4 |
| Transfection, CMV-muIL-2 | 1527 |

[1075] The results show that, with either transfection or bactofection, the CMV promoter demonstrated superior expression of muIL-2, compared to the EF-1α promoter, in primary human M2 macrophages. While transfection using the most efficient reagent currently available gave the highest levels of muIL-2 expression, bactofection also elicited high expression levels of muIL-2, demonstrating the high efficacy of heterologous gene transfer with the bacterial platforms provided herein.

### Example 11

### Bacterial Strains Efficiently Deliver Immunomodulatory Plasmids In Vivo and Demonstrate Potent Anti-Tumor Activity

[1076] Flagella-Deleted Strains Containing Plasmids Encoding Murine IL-2 Induce Potent Tumor Inhibition without Toxicity in a Mouse Model of Colorectal Carcinoma

[1077] In order to demonstrate that S. typhimurium strains containing the muIL-2 expression plasmids can induce anti-tumor efficacy without additional toxicity, the YS1646Δasd/ΔFLG strain containing the muIL-2 plasmid was compared to PBS control for safety and efficacy in the subcutaneous flank MC38 colorectal adenocarcinoma model. For this study, 6-8 week-old female C57BL/6 mice (5 mice per group) were inoculated SC in the right flank with MC38 cells (5×10⁵ cells in 100 PBS). Mice bearing established flank tumors were IV injected on day 11 with 5×10⁵ CFUs of the YS1646Δasd/ΔFLG-muIL-2 strain, or with PBS vehicle control. Tumor measurements and body weights were recorded twice weekly.

[1078] The results revealed that the YS1646Δasd/ΔFLG-muIL-2 strain demonstrated significant tumor growth inhibition (TGI) compared to PBS (76.7% TGI, P=0.005, day 21), with tumors being well-controlled out to day 40 post-implantation, when the PBS mice were euthanized. The therapy was well tolerated, even without further strain attenuation, and the weight loss early on was transient and resulted in only a 3.4% reduction in body weight, compared to PBS control at day 40. Thus, the immunostimulatory strain expressing muIL-2 potently inhibits tumor growth inhibition, in a safe and non-toxic manner, in a model of colorectal carcinoma.

### Flagella-Deleted Strains Containing Plasmids Encoding Murine IL-2 Induce Tumor-Specific Production of IL-2 In Vivo

[1079] The level of tumor muIL-2 expression, relative to spleen, was determined in order to confirm the tumor-specific nature of delivery. 6-8 week-old female C57BL/6 mice (5 mice per group) were inoculated SC in the right flank with MC38 colorectal adenocarcinoma cells (5×10⁵ cells in 100 μL PBS). Mice bearing established flank tumors were IV injected on day 10 with 5×10⁵ CFUs of strain YS1646Δasd/ΔFLG-muIL-2, or with PBS vehicle control. On day 31 post tumor implantation, tumors and spleens were excised and processed for tumor extracts using the GentleMACS™ Octo Dissociator and the M tubes (Miltenyi Biotec) molecule setting in 2 mL of PBS. The homogenates were spun down at 1300 RPM for 10 minutes, and the supernatant was collected and assayed using the muIL-2 CBA kit (BD Biosciences), according to the manufacturer's instructions. Results were quantified as pg/mL of muIL-2, and standardized to per gram of tissue.

[1080] The PBS control tumors exhibited background levels of muIL-2 in the tumor, with a mean of 134 pg/mL per gram of tumor tissue. The YS1646Δasd/ΔFLG-muIL-2 treated tumors yielded a much higher mean of 389.9 pg/mL of muIL-2 per gram of tumor tissue, demonstrating the ability to detect elevated muIL-2 levels due to plasmid delivery in the tumor-resident myeloid cells. The level of muIL-2 in the spleen, from mice injected with strain YS1646Δasd/ΔFLG-muIL-2, was an average of 6.6 pg/mL per gram of tissue, which was lower than in the PBS controls. This specificity for the tumor enables delivery of immunomodulatory levels of IL-2, in a much safer manner than conventional cytokine therapies, which are not tumor-targeted.

### Attenuated Bacterial Strains Containing Plasmids Encoding Murine Co-Stimulatory Receptor Ligand 4-1BBL Demonstrate Curative Effects In Vivo

[1081] In order to determine whether tumor-specific delivery of a co-stimulatory molecule, such as 4-1BBL, enhances anti-tumor efficacy, a bacterial strain containing a plasmid encoding 4-1BBL(Δcyt) (described above), under control of the CMV promoter and containing a 3′ WPRE, was assessed in the MC38 murine model of colorectal adenocarcinoma. For this study, 6-8 week-old female C57BL/6 mice (5 mice per group) were inoculated SC in the right flank with MC38 colorectal adenocarcinoma cells (5×10⁵ cells in 100 μL PBS). Mice bearing established flank tumors were IV injected on day 10 with 1×10⁷ CFUs of strain YS1646Δasd/ΔFLG/ΔpagP/ΔansB containing the CMV-4-1BBL(Δcyt)-WPRE plasmid, or with PBS vehicle control.

[1082] The therapy was very well tolerated, with only an initial weight loss of 2.2% that had fully recovered 3 days later. Compared to PBS, the 4-1BBL(Δcyt) therapy was highly effective and curative (90.7% TGI, 60% complete response (CR), day 30). These data demonstrate the potency and safety of delivering immunostimulatory bacteria containing plasmids encoding co-stimulatory molecules in a tumor-specific manner.

### Example 12

### Identification of Gain-of-Function Mutations in Genes that Promote Constitutive Type I Interferon Production

[1083] Instances of subjects presenting with severe auto-inflammatory conditions and vasculopathies of unknown etiology occur, and, often derive from mutations. The cause for these conditions has, and can be, identified. Steps to identify a mutational basis for such a pathology are as follows. In step one, intact genomic DNA is obtained from patients experiencing symptoms, and from healthy individuals. Whole exome sequencing is performed, then introns and exons are analyzed. Analysis of genes, and identification of mutations in products in the pathways associated with the expression of type I interferon (IFN), is performed. From this analysis, mutations are discovered in genes known to lead to constitutive functional activation of the encoded proteins, and subsequent persistent expression of type I IFN.

[1084] After identification of mutations, cDNAs encoding the full-length gene, with and without the identified mutation(s), are transfected into a reporter cell line that measures expression of type I IFN. For example, a reporter cell line can be generated where the expression of luciferase is placed under control of the promoter for IFN-β. A gain-of-function (GOF) mutant that is constitutively active will promote the expression of IFN-β, whereas the unstimulated wild-type (WT) protein will not. In the case of known STING SAVI (STING-associated vasculopathy with onset in infancy) mutants, the WT STING stimulation of IFN-β requires the addition of increasing exogenous levels of cGAMP to directly activate WT STING. Constitutively active mutations stimulate the expression of IFN-β in a cGAMP-independent manner. Exemplary gain-of-function mutations in each of STING, RIG-I, MDA5, IRF3, and IRF7, are set forth below in Example 15, and discussed elsewhere herein. Other such genes, in which gain-of-function mutations can be identified in subjects, or produced by in vitro mutation and screening, include, but are not limited, to TRIM56, RIP1, Sec5, TRAF3, TRAF2, TRAF6, STAT1, LGP2, DDX3, DHX9, DDX1, DDX9, DDX21, DHX15, DHX33, DHX36, DDX60, and SNRNP200.

### Expression of Functional Constitutive Type I IFN Mutants in Human Cells

[1085] Human STING (allele R232) and IRF3 gain-of-function (GOF) mutants (see, table below) were cloned into the pATI-1.75 vector, and the sequences were confirmed by PCR. To determine whether the STING and IRF3 GOF expression plasmids could induce functional type I IFN in human cells, the plasmids were assessed using HEK293T STING Null Reporter cells (InvivoGen), which do not contain endogenous STING. These cells express secreted embryonic alkaline phosphatase (SEAP), placed under the control of the endogenous IFN-stimulated response element (ISRE) promoter, where the coding sequence of ISRE has been replaced by the SEAP ORF using knock-in technology. Type I interferon activity can be assessed by monitoring type I IFN-stimulated SEAP production in the cell culture supernatants.

[1086] To test the relative production of type I IFN by each of the GOF mutants, 1×10⁵ 293 T-Dual™ Null cells (InvivoGen) were plated one day prior on plates coated with poly-L-lysine, to achieve 80% confluency, in a 24-well plate. On the day of transfection, 200 ng of plasmids encoding a panel of STING and IRF3 GOF mutants, including a STING wild-type (WT) and IRF3 WT control, and a negative control STING mutant that has been reported in the literature to be non-functional in human cells (STING V155R negative control (NC)), were diluted in serum-free media and added to FuGENE® transfection reagent (Promega) at the proper reagent:DNA ratios. Cell culture supernatants from each sample were collected after overnight incubation, and 10 μL of the cell culture supernatants was added to 50 μL QUANTI-Blue™ reagent (InvivoGen), which is used for measuring SEAP. Type I interferon activation was determined by measuring ISRE-induced SEAP activity on a SpectraMax® M3 Spectrophotometer (Molecular Devices), at an absorbance wavelength of 650 nm.

[1087] As shown in the table below, all GOF mutants were able to induce type I IFN activity in a STING ligand-independent manner in human cells, compared to the wild-type and negative controls, which did not induce type I IFN activity. The highest levels of type I IFN induction were observed with the human STING R284G variant, and the human IRF3 S396D phosphomimetic variant. These data support the ability of the plasmids encoding GOF mutants to produce functional, constitutively active STING and constitutively active phosphomimetic IRF3, that can induce type I IFN in a cGAMP-independent manner.

| | Mean Absorbance | Standard |
|---|---|---|
| GOF Mutant | (650 nm) | Deviation |
| Plasmid control | 0.049 | ±0.002 |
| huSTING WT | 0.144 | ±0.004 |
| huSTING VI47L | 1.399 | ±0.015 |
| huSTING N154S | 1.382 | ±0.008 |
| huSTING V155M | 1.360 | ±0.048 |
| huSTING C206Y | 1.566 | ±0.121 |
| huSTING R281Q | 1.546 | ±0.132 |
| huSTING R284G | 1.831 | ±0.039 |
| huSTING V155R (NC) | 0.181 | ±0.014 |
| huIRF3 WT | 0.781 | ±0.073 |
| huIRF3 S396D | 1.922 | ±0.131 |

### Infection of Flagella-Deleted Strains, Containing Plasmids Encoding Constitutively Active Type I IFN Mutants, Converts Human M2 Macrophages to Type I IFN-Producing M1 Macrophages

[1088] It was determined if primary human M2 macrophages, infected with flagella-deleted strains containing plasmids encoding constitutively active type I IFN GOF variants, could be converted to producers of type I IFN and downstream chemokines, such as CXCL10 (also known as IP-10).

[1089] Frozen human PBMCs, isolated from healthy human donors, were thawed in complete medium (RPMI-1640+1× non-essential amino acids +5% Human AB serum), and washed by centrifugation for 10 minutes at 800 RPM at room temperature. PBMCs were resuspended in PBS+2% FBS, and monocytes were negatively isolated using a CD16 depletion kit (StemCell Technologies). To generate primary human M2 macrophages, isolated untouched monocytes were washed by centrifugation in PBS+2% FBS, and resuspended in complete medium containing 100 ng/mL human M-CSF and 10 ng/mL human IL-4. Isolated monocytes (3e5 per well) were then seeded in a 24-well plate with a final volume of 750 microliters. Two days after the seeding, the cell culture media was entirely aspirated and replaced with fresh complete medium containing 100 ng/mL human M-CSF and 10 ng/mL human IL-4. Two days later (on day 4), 500 μL of complete medium containing 100 ng/mL human M-CSF and 10 ng/mL human IL-4 was added per well, and incubated for 48 hours. On day 6, the cell culture media was entirely aspirated and replaced with fresh complete medium without cytokines. Duplicate wells were infected at an MOI of 450, for one hour in RPMI, with the following strains: YS1646Δasd/ΔFLG containing a plasmid encoding wild-type (WT) human (hu) STING; YS1646Δasd/ΔFLG containing a plasmid encoding the huSTING R284G variant; YS1646Δasd/ΔFLG containing a plasmid encoding WT huIRF3; YS1646Δasd/ΔFLG containing a plasmid encoding the huIRF3 S396D variant; or a strain containing a plasmid control. The cells were then washed 3 times with PBS, and resuspended in RPMI+100 μg/mL gentamicin (Sigma). As a control, the STING agonist 3′5′ RpRp c-di-AMP (InvivoGen), an analog of the clinical compound ADU-S100, was added to the cells at a concentration of 10 μg/mL.

[1090] After 24 hours, the cells were lysed with 350 μL Buffer RLT with β-ME (Qiagen), and RNA extraction was performed using the Qiagen RNeasy® Mini Kit with the following modification. A genomic DNA elimination step, using an RNase-Free DNase kit (Qiagen), was included to remove genomic DNA from the total RNA. Total RNA concentration was measured using a NanoDrop™ One^{C} UV-Vis Spectrophotometer (Thermo Scientific). The purity of each sample also was assessed from the A260/A230 absorption ratio. RNA was stored at −80° C. without freeze-thawing until reverse-transcription was performed. Synthesis of cDNA was performed from 0.4-1m of template RNA using a C1000 Touch Thermal Cycler (Bio-Rad) and SuperScript™ VILO™ Master Mix (Invitrogen) in a 30 μL reaction, according to the manufacturer's instructions.

[1091] qPCR was performed with a CFX96™ Real-Time System (Bio-Rad). SYBR® primers for huCXCL10 (qHsaCED0046619), huIRF3 (qHsaCID0013122), huSTING (qHsaCID0010565), and huIFNβ1 (qHsaCED0046851) were purchased from Bio-Rad. The qPCR reaction (20 μL) was conducted per protocol, using the iTaq™ Universal SYBR® Green Supermix (Bio-Rad). The standard thermocycling program on the BioRad CFX96™ Real-Time System consisted of a 95° C. denaturation for 30 seconds, followed by 40 cycles of 95° C. for 5 seconds and 60° C. for 30 seconds. Reactions with template free control were included for each set of primers on each plate. All samples were run in duplicate, and the mean C_{q} values were calculated. Quantification of the target mRNA was normalized using Gapdh reference mRNA (Bio-Rad, qMmuCED0027497). ΔC_{q} was calculated as the difference between the target and reference gene. ΔΔC_{q} was obtained by normalizing the ΔC_{q} values of the treatments to the ΔC_{q} values of the non-treatment control. Fold increase was calculated as 2\hat{ }-ΔΔC_{q}. The values are shown in the table below, as the average of the duplicate wells.

[1092] As shown in the table below, compared to the infection of the plasmid control, strains of YS1646Δasd/ΔFLG, containing plasmids encoding WT huSTING and huSTING R284G, induced high levels of STING expression, which were significantly higher compared to the plasmid control or the small molecule STING agonist. Similarly, the strains containing plasmids encoding WT huIRF3 and huIRF3-S396D induced high levels of IRF3 expression, which were significantly higher than the plasmid control, or the small molecule STING agonist. The bacterial strain containing a plasmid encoding the huSTING R284G variant induced much higher expression of IFNβ and CXCL10, as compared to the strain containing a plasmid encoding WT huSTING. This demonstrates the ability of the strain, containing a plasmid encoding a constitutively active STING GOF variant, to convert a human primary, immunosuppressive M2 macrophage into an M1, type I IFN producing, cell. While the strains containing plasmids encoding WT huIRF3 and huIRF3-S396D both induced more, or similar levels of IFNβ, they induced less CXCL10 than the huSTING-R284G variant.

| | Fold Expression Over Untransfected Control | | | |
|---|---|---|---|---|
| GOF Mutant | STING | IRF3 | IFNβ | CXCL10 |
| Plasmid Control | 22.3 | 0 | ND | ND |
| WT huSTING | 24017.1 | ND | 3.4 | 3934.5 |
| huSTING R284G | 36542.7 | ND | 20 | 23484.5 |
| WT huIRF3 | 22.7 | 478.9 | 17.5 | 10766.2 |
| huIRF3-S396D | 30.8 | 346.4 | 26.3 | 15696.1 |
| 3′5′ RpRp c-di-AMP | 244.8 | 1.11 | 1.77 | 594.1 |

ND = No Data

[1093] These data demonstrate the expression of constitutive GOF type I IFN variants in human primary M2 macrophages, and converting these cells to M1-like, type I IFN producing, cells.

### Example 13

### Immunostimulatory Bacteria, Containing Plasmids Encoding Constitutive Type I IFN Variants, Demonstrate Potent Anti-Tumor Immunity in a Murine Model of Colorectal Cancer

### Human GOF STING Mutants Show Anti-Tumor Activity in Mouse Models

[1094] To demonstrate that immunostimulatory bacterial strains, containing expression plasmids encoding constitutively active STING variants, induce anti-tumor efficacy, strain YS1646Δasd/ΔFLG (with a knockout of both flagellin genes fljB and fliC) was electroporated with a plasmid containing an expression cassette for human STING with the allele R232 and the GOF mutation V155M (huSTING V155M), behind the human elongation factor-1 alpha (EF-1α) promoter, and was compared to strain YS1646 alone, and to a PBS vehicle control. The gene encoding huSTING V155M was generated using DNA synthesis and cloned into the pATI-1.75 vector. In order to evaluate whether a constitutively active human STING variant could demonstrate anti-tumor activity in mice, 6-8 week-old female C57BL/6 mice (5 mice per group) were inoculated SC in the right flank with MC38 colorectal adenocarcinoma cells (5×10⁵ cells in 100 μL PBS). Mice bearing established flank tumors were IV injected on day 8 with 5×10⁵ CFUs of strain YS1646Δasd/ΔFLG-huSTING V155M, with strain YS1646, or with PBS control.

[1095] The results showed that the YS1646 parental strain was only mildly effective as an anti-tumor therapy, and was not curative (35% TGI, p=NS (not significant), day 28), in line with previously published data. The more attenuated strain, containing a plasmid encoding constitutively active human STING, YS1646Δasd/ΔFLG-huSTING V155M, however, elicited significant tumor control (60% TGI, p<0.05, day 28) compared to PBS, and had a cure rate of 20%. Thus, an immunostimulatory bacterial strain that delivers a constitutively active STING variant potently inhibits tumor growth, and demonstrates curative effects in a model of colorectal adenocarcinoma.

### Murine Phosphomimetic IRF3 Shows Curative Effects In Vivo

[1096] The murine version of the phosphomimetic human IRF3 variant was designed, designated muIRF3-S388D, and evaluated in a murine model of colorectal adenocarcinoma. Strain YS1646Δasd/ΔFLG was electroporated with a plasmid containing an expression cassette for murine IRF3 with the GOF mutation S388D (muIRF3-S388D), behind the human elongation factor-1 alpha (EF-1α) promoter, and was compared to PBS vehicle control. The gene encoding muIRF3-S388D was generated using DNA synthesis and cloned into the pATI-1.75 vector. 6-8 week-old female C57BL/6 mice (5 mice per group) were inoculated SC in the right flank with MC38 colorectal adenocarcinoma cells (5×10⁵ cells in 100 μL PBS). Mice bearing established flank tumors were IV injected on day 10 with 5×10⁵ CFUs of strain YS1646Δasd/ΔFLG-EF-1α-muIRF3-S388D, and compared to PBS vehicle control.

[1097] The therapy was very well tolerated, with an initial weight loss nadir of only 0.3%. Compared to PBS, the bacterial strain containing the plasmid encoding the muIRF3-S388D GOF mutant was highly effective and curative (81.8% TGI, 60% CR, day 42). These data demonstrate the potency and safety of delivering constitutively active type I IFN inducing variants in a tumor-specific manner.

### Murine STING GOF Variants Show Potent and Curative Anti-Tumor Activity

[1098] A panel of murine orthologs of the human STING variants discovered in human patients, was designed. These orthologs differ by one codon from the human variants, and were cloned into the pATI-1.75 vector under the control of an EF-1α promoter, to yield the following set of mutants: muSTING N153S, muSTING V154M, muSTING R280Q, muSTING V146L, muSTING R283G, and muSTING C205Y, among others. The STING variants were evaluated in the MC38 model of murine adenocarcinoma for anti-tumor efficacy. For the studies, 6-8 week-old female C57BL/6 mice (5 mice per group) were inoculated SC in the right flank with MC38 colorectal adenocarcinoma cells (5×10⁵ cells in 100 μL PBS). Mice bearing established flank tumors were IV injected on day 10 with 5×10⁵ CFUs of strain YS1646Δasd/ΔFLG, containing a plasmid with EF-1α driving the expression of muSTING N153S, muSTING V154M, muSTING R280Q, muSTING V146L, or muSTING R283G, or a scrambled shRNA plasmid control, and compared to PBS vehicle control.

[1099] In this experiment, strain YS1646Δasd/ΔFLG-EF-1α-shSCR (scrambled plasmid control) demonstrated anti-tumor efficacy as compared to PBS control (73% TGI, day 26), which was much more potent than the YS1646 parental strain has shown historically. This can be due to inherently immunostimulatory elements on the plasmid itself, such as CpGs and RNAi stimulatory elements. However, this therapy was the least well tolerated of the group, demonstrating a weight loss nadir of 9.9% that only resolved at the very end of the study. In contrast, the constitutively active murine STING mutants resulted in a lower weight loss that was transient and that resolved within days. The relative anti-tumor efficacy of these variants revealed differences in activity, with only two variants demonstrating curative effects and enhanced efficacy over the plasmid control, muSTING N153S, and muSTING R283G.

| Murine STING | TGI vs. PBS, | Complete | Weight Loss |
|---|---|---|---|
| GOF Mutant | Day 26 | Response | Nadir and Day |
| Plasmid Control | 73.0% | 0/5 | 9.9%, day 19 |
| muSTING N153S | 81.7% | 1/5 | 6.2%, day 12 |
| muSTING VI54M | 69.4% | 0/5 | 4.3%, day 12 |
| muSTING R280Q | 68.7% | 0/5 | 5.4%, day 12 |
| muSTING VI46L | 63.4% | 0/5 | 2.8%, day 12 |
| muSTING R283G | 81.2% | 1/5 | 6.9%, day 12 |

[1100] In a follow-up study, the murine STING C205Y variant was tested along with the R283G and N153S variants, to compare their anti-tumor efficacy. 6-8 week-old female C57BL/6 mice (5 mice per group) were inoculated SC in the right flank with MC38 colorectal adenocarcinoma cells (5×10⁵ cells in 100 μL PBS). Mice bearing established flank tumors were IV injected on day 9 with 5×10⁵ CFUs of strain YS1646Δasd/ΔFLG, containing a plasmid with EF-1α driving the expression of muSTING N153S, muSTING R283G, or muSTING C205Y, and compared to PBS vehicle control. As before, the STING variants were well tolerated, and only a transient dip in weight loss was observed that resolved quickly. This is likely due to on-target therapy, as it is also observed with the small molecule STING agonists. The efficacy of the two constitutively active murine STING variants, muSTING N153S and muSTING R283G, was nearly identical to the previous study, although the weight loss was much less, for reasons unclear. The muSTING C205Y variant also was highly effective, although not curative.

| Murine STING | TGI vs. PBS, | Complete | Weight Loss |
|---|---|---|---|
| GOF Mutant | Day 29 | Response | Nadir and Day |
| muSTING C205Y | 79.4% | 0/5 | 2.6%, day 13 |
| muSTING N153S | 79.3% | 1/5 | 2.2%, day 13 |
| muSTING R283G | 85.1% | 1/5 | 1.8%, day 13 |

[1101] The STING-cured mice from these studies were re-challenged at day 40 post-initial tumor implantation on the opposite flank, SC, with MC38 colorectal adenocarcinoma cells (5×10⁵ cells in 100 μL PBS). Compared to naïve mice (N=5), in which all tumors grew out, all of the STING-cured mice rejected the tumors, demonstrating the engagement of adaptive immunity.

[1102] These data validate the safety and potency of the murine versions of the human constitutively active STING variants in a murine model of colorectal carcinoma, and reveal a small subset of variants that have enhanced potency compared to the other STING variants. These highly active variants also elicit protective immunity, demonstrating the potency of tumor-specific production of type I interferon.

### Murine STING GOF Variants Demonstrate Significant Tumor Remodeling Following IV Dosing

[1103] It was next determined whether the bacterial strains containing plasmids encoding constitutively active STING variants demonstrate differences in their ability to remodel the tumor microenvironment (TME) following IV dosing. To test this, 6-8 week-old female C57BL/6 mice (5 mice per group) were inoculated SC in the right flank with MC38 colorectal adenocarcinoma cells (5×10⁵ cells in 100 μL PBS). Mice bearing established flank tumors were IV injected on day 8 with 5×10⁵ CFUs of strain YS1646Δasd/ΔFLG, containing a plasmid with EF-1α driving the expression of muSTING N153S, muSTING V154M, muSTING R280Q, muSTING V146L, muSTING R283G, or plasmid control, and compared to PBS vehicle control.

[1104] At day 28 post tumor implantation, tumors were excised for analysis. Tumors were cut into 2-3 mm pieces into gentleMACS™ C tubes (Miltenyi Biotec) filled with 2.5 mL enzyme mix (RPMI-1640+10% FBS with 1 mg/mL Collagenase IV and 20 μg/mL DNase I). The tumor pieces were dissociated using OctoMACS™ (Miltenyi Biotec) specific dissociation program (mouse implanted tumors), and the whole cell preparation was incubated with agitation for 45 minutes at 37° C. After 45 minutes of incubation, a second round of dissociation was performed using the OctoMACS™ (mouse implanted tumor) program, and the resulting single cell suspensions were filtered through a 70 μM nylon mesh into a 50 mL tube. The nylon mesh was washed once with 5 mL of RPMI-1640+10% FBS, and the cells were filtered a second time using a new 70 μM nylon mesh into a new 50 mL tube. The nylon mesh was washed with 5 mL of RPMI-1640 with 10% FBS, and the filtered cells were then centrifuged at 1000 RPM for 7 minutes. The resulting dissociated cells were resuspended in PBS and kept on ice before the staining process.

[1105] The percentage of live tumor-infiltrating leukocytes (TILs), including CD4⁺ Tregs, CD4⁺ Th1 cells, CD8⁺ T cells, neutrophils, monocytes, dendritic cells (DCs), M1 macrophages, and M2 macrophages, following the administration of strain YS1646Δasd/ΔFLG, containing plasmids encoding the various GOF muSTING mutants, was determined by flow cytometry. For the flow-cytometry staining, 100 μL of the single cell suspensions were seeded in wells of a V-bottom 96-well plate. PBS containing a dead/live stain (Zombie Aqua™, BioLegend) and Fc Blocking reagents (BD Biosciences) were added at 100 μL per well, and incubated on ice for 30 minutes in the dark. After 30 minutes, the cells were washed twice with PBS+2% FBS by centrifugation at 1300 RPM for 3 minutes. The cells were then resuspended in PBS+2% FBS, containing fluorochrome-conjugated antibodies (CD4 FITC clone RM4-5; CD8a BV421 clone 53-6.7; F4/80 APC clone BM8; CD11b PE-Cy7 clone M1/70; CD45 BV570 clone 30-F11; CD3 PE clone 145-2C11; Ly6C BV785 clone HK1.4; I-A/I-E APC-Cy7 clone M5/114.15.2; Ly6G BV605 clone 1A8; and CD24 PercP-Cy5.5 clone M1/69; all from BioLegend), and incubated on ice for 30 minutes in the dark. After 30 minutes, the cells were washed twice with PBS+2% FBS by centrifugation at 1300 RPM for 3 minutes and resuspended in flow cytometry fixation buffer (Thermo Fisher Scientific). Flow cytometry data were acquired using the ACEA NovoCyte® flow cytometer (ACEA Biosciences, Inc.), and analyzed using the FlowJo™ software (Tree Star, Inc.).

[1106] As shown in the tables below, the YS1646Δasd/ΔFLG strain with the EF-1α plasmid control demonstrated predominantly high neutrophil infiltration, despite some CD8⁺ T-cell recruitment, likely due to immunostimulatory elements on the plasmid. In contrast, the different muSTING variants had unique tumor-infiltrating immune cell signatures, with some, such as muSTING V146L and muSTING R283G, resulting in fewer immunosuppressive neutrophils than the PBS control. The most favorable immune profiles were observed in the tumors from mice that were administered the muSTING R283G and muSTING N153S mutants, with high numbers of CD4⁺ Th1 cells and CD8⁺ T-cells, and low numbers of neutrophils, which indicates highly favorable conditions for generating an adaptive immune response. In addition, the muSTING R283G and muSTING N153S mutants had significantly higher p15e tumor-antigen-specific CD8⁺ T-cells in the tumor, as compared to PBS. These trends were also recapitulated in the total cell counts, as shown below. Thus, delivery of constitutively active STING variants to the tumor-resident myeloid cells leads to a complete remodeling of the immunosuppressive tumor microenvironment, towards an adaptive anti-tumor phenotype, and away from a bacterial phenotype, which is characterized by the promotion of innate immunity and the suppression of adaptive immunity.

% of Live Tumor-Infiltrating Leukocytes (TILs)

| | mu STING GOF Mutants Encoded on Plasmids in IV-Administered | | | | | | |
|---|---|---|---|---|---|---|---|
| | YS1646Δasd/ΔFLG Strain | | | | | | |
| % Among | | Plasmid | muSTING | muSTING | muSTING | muSTING | muSTING |
| TILs | PBS | Control | N153S | V154M | R280Q | V146L | R283G |
| CD4⁺ Tregs | 2.9 ± 1.7 | 1.8 ± 0.5 | 3.3 ± 2.6 | 1.5 ± 0.5 | 2 ± 0.9 | 1.8 ± 0.5 | 1.5 ± 0.4 |
| CD4⁺ Th1 | 6.6 ± 3.2 | 13 ± 4.3 | 20.7 ± 10.4 | 13.2 ± 6.1 | 22.6 ± 7.4 | 19.5 ± 4.9 | 25.6 ± 7.8 |
| Cells | | | | | | | |
| CD8⁺ T | 16.2 ± 10.2 | 24.5 ± 11.6 | 25.8 ± 9.2 | 16.5 ± 4.4 | 20.2 ± 7.2 | 20.8 ± 3.6 | 27.8 ± 8.7 |
| Cells | | | | | | | |
| Neutrophils | 11.3 ± 14.2 | 30.6 ± 17.4 | 13.5 ± 12.4 | 21.4 ± 12.5 | 15.9 ± 11.6 | 9.1 ± 6.5 | 6.6 ± 5.9 |
| Monocytes | 16.6 ± 3.5 | 12.7 ± 2.7 | 13.7 ± 3.9 | 16.4 ± 5.4 | 15.8 ± 6.5 | 15.6 ± 2.2 | 13.5 ± 1.3 |
| DCs | 1.4 ± 0.4 | 0.5 ± 0.3 | 0.9 ± 0.7 | 0.4 ± 0.2 | 0.5 ± 0.3 | 0.5 ± 0.2 | 0.5 ± 0.3 |
| M1 | 10.2 ± 6.2 | 3.1 ± 2.1 | 4.6 ± 2.1 | 9.4 ± 5 | 5.6 ± 4.2 | 8.6 ± 3.7 | 5.4 ± 2 |
| Macrophages | | | | | | | |
| M2 | 14.9 ± 10.6 | 4.6 ± 2.6 | 7.3 ± 3.1 | 11.6 ± 5.2 | 8.6 ± 6.3 | 12.8 ± 5 | 9.2 ± 4 |
| Macrophages | | | | | | | |

Total Cell Counts

| | muSTING GOF Mutants Encoded on Plasmids in IV-Administered | | | | | | |
|---|---|---|---|---|---|---|---|
| | YS1646Δasd/ΔFLG Strain | | | | | | |
| | | Plasmid | muSTING | muSTING | muSTING | muSTING | muSTING |
| | PBS | Control | N153S | V154M | R280Q | V146L | R283G |
| CD4⁺ Tregs | 437 ± 230 | 148 ± 102 | 530 ± 117 | 310 ± 114 | 520 ± 169 | 297 ± 207 | 438 ± 176 |
| CD4⁺ Th1 | 1108 ± 599 | 1059 ± 711 | 3765 ± 917 | 3349 ± 2869 | 5864 ± 1618 | 2961 ± 1800 | 7463 ± 3240 |
| Cells | | | | | | | |
| CD8⁺ T | 2948 ± 3119 | 1571 ± 601 | 6152 ± 3820 | 3898 ± 2823 | 5446 ± 2454 | 3266 ± 1277 | 7566 ± 1782 |
| Cells | | | | | | | |
| Neutrophils | 1531 ± 1604 | 2604 ± 1975 | 3699 ± 4400 | 4815 ± 3423 | 4301 ± 3502 | 1240 ± 1160 | 1698 ± 1485 |
| Monocytes | 2871 ± 1472 | 912 ± 369 | 3182 ± 1708 | 3350 ± 1183 | 4132 ± 1595 | 2524 ± 1420 | 3811 ± 996 |
| DCs | 233 ± 97 | 28 ± 18 | 161 ± 45 | 82 ± 31 | 130 ± 90 | 78 ± 48 | 135 ± 90 |
| M1 | 2163 ± 2025 | 227 ± 213 | 881 ± 316 | 1797 ± 750 | 1421 ± 910 | 1325 ± 856 | 1524 ± 658 |
| Macrophages | | | | | | | |
| M2 | 3046 ± 2996 | 334 ± 275 | 1391 ± 373 | 2183 ± 608 | 2189 ± 1402 | 2043 ± 1237 | 2612 ± 1330 |
| Macrophages | | | | | | | |

### Example 14

### Expression of Multiple Immunomodulatory Proteins Using Combinatorial Plasmid Expression Cassettes

### Multi-Modular Plasmid Expression Cassettes Demonstrate the Ability to Produce Multiple Immunomodulatory Proteins in Human Cells

[1107] Combinations of nucleic acids, encoding GOF type I IFN inducing variants and cytokines, were cloned into the pATI-1.75 vector, using two separate ORFs, under the control of the CMV and EF-1α promoters (dual promoter system), or using T2A sequences within the ORFs and one promoter (single promoter system). The constructs also optionally included post-transcriptional regulatory elements (PREs), such as 3′ WPRE or HPRE, and/or polyadenylation signal sequences, such as the SV40 or bovine growth hormone (bGH) polyadenylation signals. The constructs prepared included those encoding the cytokines muIL-2, muIL-2 with codon optimization (muIL-2 CO), muIL-21, muIL-12p70, muIL-15Rα-IL-15sc, muIL-18, and muIFN-α2, and combinations thereof; the muSTING variant with the mutation R283G; and/or the murine co-stimulatory molecule 4-1BBL with a deletion of the cytoplasmic domain (mu4-1BBLΔcyt). The sequences were confirmed by PCR.

[1108] To determine whether the combination plasmids, containing GOF type I IFN inducing variants, can induce functional type I IFN in human cells, the plasmids were assessed using HEK293T STING Null Reporter cells (InvivoGen), which do not contain endogenous STING. These cells express secreted embryonic alkaline phosphatase (SEAP), placed under the control of the endogenous IFN-stimulated response element (ISRE) promoter, where the coding sequence of ISRE has been replaced by the SEAP ORF using knock-in technology. Type I interferon activity can be assessed by monitoring type I IFN-stimulated SEAP production in the cell culture supernatants. In addition, supernatants were collected and evaluated for relative cytokine concentrations by ELISA.

[1109] To test the relative production of type I IFN and co-expressed cytokines, 2×10⁵ 293 T-Dual™ Null cells (InvivoGen) were plated one day prior on 24-well plates coated with poly-L-lysine, to achieve 80% confluency. On the day of transfection, 500 ng of plasmids encoding a panel of GOF variants, cytokines, and co-stimulatory molecules, alone or in various combinations, were diluted in serum-free media and added to FuGENE® transfection reagent (Promega), at the proper reagent:DNA ratios. Cell culture supernatants from each sample were collected after overnight incubation, and 20 μL of the cell culture supernatants was added to 180 μL QUANTI-Blue™ reagent (InvivoGen). Type I interferon activation was determined by measuring ISRE-induced SEAP activity on a SpectraMax® M3 Spectrophotometer (Molecular Devices) at an absorbance wavelength of 650 nm. The muIL-2 constructs were evaluated for muIL-2 expression in a murine IL-2 ELISA (R&D Systems), according to the manufacturer's instructions. The muIL-12p70 constructs were evaluated in a murine IL-12 ELISA (R&D Systems), according to the manufacturer's recommendation. For the muIL-15Rα-IL-15sc constructs, the murine IL-15 ELISA (eBioscience) was used, per kit instructions. IFN-α2 was measured using the RAW-Lucia™ ISG reporter cell line (InvivoGen). Murine IL-18 and murine IL-21 were measured by ELISA (Invitrogen).

[1110] As shown in the table below, assays performed to detect the presence of secreted functional proteins demonstrated high expression of multiple combination payloads. These include cytokine combinations, as well as combinations with type I IFN inducing GOF variants, and/or co-stimulatory payloads. These data validate the ability of the platform provided herein to express multiple immunomodulatory proteins from a single expression cassette.

| | Protein Expression | | | |
|---|---|---|---|---|
| | STING | IL-2 | 1L-12 | |
| | (Abs 650 | (Abs 650 | (Abs 650 | IL-15 |
| Construct | nm) | nm) | nm) | (pg/mL) |
| CMV-muIL-2 | | 1.995 | | |
| CMV-muIL-2 | | 2.0073 | | |
| CO-WPRE | | | | |
| EF-1α-muIL-21 | | | | |
| CMV-muIL-21 | | | | |
| EF-1α-muIL-12p70 | | | 0.9052 | |
| CMV-muIL-15Rα- | | | | 30140.8 ± 535.5 |
| IL-15sc-WPRE | | | | |
| EF-1α-muIFN-a2 | | | | |
| CMV-muIFN- | | | | |
| α2-WPRE | | | | |
| CMV-muIL-2 | | 2.0998 | | |
| CO_T2A_muIFN- | | | | |
| α2-WPRE | | | | |
| CMV-muIL-15Rα- | | | | 29895.9 ± 630.9 |
| sc_T2A_muIFN- | | | | |
| α2-WPRE | | | | |
| CMV-muIL-2 CO + | | 2.0589 | | |
| EF-1α-muIFN-α2 | | | | |
| CMV-muIL-21 + | | | | |
| EF-1α-muIFN-α2 | | | | |
| CMV-muIL-2 CO + | | 2.0085 | | |
| EF-1α-muIL-21 | | | | |
| CMV-muIL-15Rα-IL- | | | | 12605 ± 278.6 |
| 15sc + EF-1α-muIL-21 | | | | |
| CMV-muIL-12p70 + | | | 1.0893 | |
| EF-1α-muIL-21 | | | | |
| CMV-muIL-2 CO- | | 1.207 ± 0.121 | | |
| HPRE-bGHpolyA | | | | |
| EF-1α-muSTING | 0.4874 ± 0.0045 | | | |
| R283G | | | | |
| CMV-muSTING | 0.4866 ± 0.0511 | | | |
| R283G-WPRE | | | | |
| CMV-muIL-2 CO + | | 0.9971 ± 0.0104 | 0.3303 ± 0.0157 | |
| EF-1α-muIL-12p70 | | | | |
| CMV-muIL-15Rα-IL- | | | 0.3629 ± 0.0242 | |
| 15sc + EF-1α- | | | | |
| muIL-12p70 | | | | |
| CMV-muIL-18 + | 0.7096 ± 0.0169 | | | |
| EF-1α-muSTING | | | | |
| R283G-WPRE | | | | |
| CMV-muIL- | | | 0.6538 ± 0.0205 | |
| 12p70_T2A_muIFN- | | | | |
| α2 + EF-1α- | | | | |
| IL-18-WPRE | | | | |
| CMV-muIL- | 0.454 ± 0.123 | | 0.4581 ± 0.0158 | |
| 12p70_T2A_muSTING | | | | |
| R283G + EF-1α- | | | | |
| muIL-18-WPRE | | | | |
| CMV-muIL-15Rα-IL- | 0.5867 ± 0.0333 | | | |
| 15sc_T2A_muSTING | | | | |
| R283G + EF-1α- | | | | |
| muIL-18-WPRE | | | | |
| CMV-muIL-15Rα-IL- | | | | |
| 15sc_T2A_muIFN- | | | | |
| α2 + EF-1α- | | | | |
| muIL-18-WPRE | | | | |
| CMV-4-1BBL(Δcyt) + | 0.2525 ± 0.0144 | | | |
| EF-1α-muSTING | | | | |
| R283G-WPRE | | | | |

| | Protein Expression | | | |
|---|---|---|---|---|
| | IL-15 | IFN-α2 | IL-21 | |
| | (Abs 650 | (Lu mine | (OD at | IL-18 |
| Construct | nm) | scence) | 450 nm) | (pg/mL) |
| CMV-muIL-2 | | | | |
| CMV-muIL-2 | | | | |
| CO-WPRE | | | | |
| EF-1α-muIL-21 | | | 1.138 ± 0.1853 | |
| CMV-muIL-21 | | | 0.4758 ± 0.0461 | |
| EF-1α-muIL-12p70 | | | | |
| CMV-muIL-15Rα- | 0.8224 | | | |
| IL-15sc-WPRE | | | | |
| EF-1α-muIFN-a2 | | 14570 | | |
| CMV-muIFN- | | 18658 | | |
| α2-WPRE | | | | |
| CMV-muIL-2 | | 13066 | | |
| CO_T2A_muIFN- | | | | |
| α2-WPRE | | | | |
| CMV-muIL-15Rα- | 1.0125 | 8571 | | |
| sc_T2A_muIFN- | | | | |
| α2-WPRE | | | | |
| CMV-muIL-2 CO + | | 8297 | | |
| EF-1α-muIFN-α2 | | | | |
| CMV-muIL-21 + | | 8682 | 0.3797 ± 0.0830 | |
| EF-1α-muIFN-α2 | | | | |
| CMV-muIL-2 CO + | | | 0.7565 ± 0.1271 | |
| EF-1α-muIL-21 | | | | |
| CMV-muIL-15Rα-IL- | 0.2362 | | 0.2963 ± 0.0155 | |
| 15sc + EF-1α-muIL-21 | | | | |
| CMV-muIL-12p70 + | | | 0.1479 ±0.001 | |
| EF-1α-muIL-21 | | | | |
| CMV-muIL-2 CO- | | | | |
| HPRE-bGHpolyA | | | | |
| EF-1α-muSTING | | | | |
| R283G | | | | |
| CMV-muSTING | | | | |
| R283G-WPRE | | | | |
| CMV-muIL-2 CO + | | | | |
| EF-1α-muIL-12p70 | | | | |
| CMV-muIL-15Rα-IL- | 0.1464 ± 0.0034 | | | |
| 15sc + EF-1α- | | | | |
| muIL-12p70 | | | | |
| CMV-muIL-18 + | | | | 5991.4 ± 1642.0 |
| EF-1α-muSTING | | | | |
| R283G-WPRE | | | | |
| CMV-muIL- | | 577.3 ± 122.5 | | 12685.0 ± 4402.8 |
| 12p70_T2A_muIFN- | | | | |
| α2 + EF-1α- | | | | |
| IL-18-WPRE | | | | |
| CMV-muIL- | | | | 3805.8 ± 1369.5 |
| 12p70_T2A_muSTING | | | | |
| R283G + EF-1α- | | | | |
| muIL-18-WPRE | | | | |
| CMV-muIL-15Rα-IL- | 0.2326 ± 0.0049 | | | 3626 ± 1248 |
| 15sc_T2A_muSTING | | | | |
| R283G + EF-1α- | | | | |
| muIL-18-WPRE | | | | |
| CMV-muIL-15Rα-IL- | 0.3512 ± 0.0172 | 1802 ± 216.5 | | 6872 ± 1671 |
| 15sc_T2A_muIFN- | | | | |
| α2 + EF-1α- | | | | |
| muIL-18-WPRE | | | | |
| CMV-4-1BBL(Δcyt) + | | | | |
| EF-1α-muSTING | | | | |
| R283G-WPRE | | | | |

Constitutively Active Type I IFN Inducing Variants have Unique Cytokine and Chemokine Profiles

[1111] Supernatants harvested from HEK293T transfection experiments with a panel of human type I IFN inducing GOF variants, tested as described above, were evaluated for downstream signaling differences using a human anti-viral CBA panel (BD Biosciences), according to the manufacturer's protocol. Each transfection was performed in duplicate, and cytokine levels were measured. The average of two measurements was calculated. Fold increase in average cytokine secretion was calculated compared to untransfected wells, in which the average cytokine secretion was set as 1.00.

[1112] As shown in the table below, low levels of human IL-12p70 were produced in the cells. However, several human type I IFN inducing GOF variants induced the production of type I IFN-α2 and/or IFN-β, including the phosphomimetic IRF3 variant (huIRF3 S396D), as well as several constitutively active STING variants. A number of these GOF variants produced high levels of secreted CXCL10, demonstrating the ability of these expressed variants to recruit T-cells into the tumor microenvironment. The highest levels of CXCL10 expression were observed following the expression of the huSTING variant with the mutation R284G.

[1113] These data validate the use of multiplexed plasmid expression constructs, containing type I IFN inducing GOF variants, for induction of functional downstream cytokines and chemokines, such as CXCL10/IP-10. These variants all have unique signatures, and STING GOF variants induced the highest levels of CXCL10 secretion, particularly huSTING R284G (corresponding to muSTING R283G).

| | Secreted Immunostimulatory | | | |
|---|---|---|---|---|
| | Cytokines and Chemokines | | | |
| | (Fold Relative to Untransfected) | | | |
| Constructs | IL-12p70 | IFN-α2 | IFN-β | CXCL10 |
| Untransfected control | 1.00 | 1.00 | 1.00 | 1.00 |
| EF-1α-mCherry Control | 1.50 | 1.59 | 1.50 | 2.05 |
| EF-1α-huSTING Negative | 1.32 | 2.10 | 1.43 | 2.16 |
| Control | | | | |
| EF-1α-huSTING WT | 1.66 | 1.69 | 1.46 | 2.77 |
| EF-1α-huSTING-V147L | 1.78 | 2.35 | 21.35 | 332.14 |
| EF-1α-huSTING-N154S | 1.52 | 2.23 | 23.37 | 398.99 |
| EF-1α-huSTING-V155M | 2.00 | 2.09 | 6.02 | 121.38 |
| EF-1α-huSTING-C206Y | 1.39 | 2.02 | 16.51 | 218.38 |
| EF-1α-huSTING-R281Q | 1.35 | 1.35 | 8.17 | 301.18 |
| EF-1α-huSTING-R284G | 1.46 | 2.14 | 13.41 | 429.40 |
| EF-1α-huIRF3-WT | 1.50 | 1.49 | 1.50 | 1.11 |
| EF-1α-huIRF3-S396D | 1.93 | 9.37 | 38.06 | 65.89 |
| CMV-muIFN-α2-WPRE | 1.03 | 3.63 | 1.37 | 146.49 |
| CMV-muIL-2 | 1.03 | 1.63 | 1.37 | 86.02 |
| CO_T2A_muIFN-α2- | | | | |
| WPRE | | | | |
| CMV-muIL-15Rα-IL- | 1.03 | 0.80 | 1.37 | 40.85 |
| 15sc_T2A_muIFN-α2- | | | | |
| WPRE | | | | |

### Immune Cell Co-Culture Assays Identify Optimal Combinations of Immunomodulatory Targets

[1114] In order to determine the optimal combinations of cytokines to elicit T-cell recruitment and activation, a panel was tested in a macrophage and T-cell co-culture assay. Golden ticket (STING deficient) murine primary bone marrow-derived macrophages (BMMs) were generated as described above (see, Example 6), using a 24-well plate. Each well was transfected with the appropriate DNA constructs using FuGENE® transfection reagents (Promega). The constructs included those encoding muIL-2 CO, muIL-12p70, muSTING-R283G, muIL-2 CO+muIL-12p70, muIL-15Ra-IL-15sc+muIL-12p70, and muIL-12p70+muSTING-R283G+muIL-18.

[1115] 24 hours post-transfection, 100 μL of cell culture supernatants were harvested from the wells for a flow cytometry-based cytokine bead array (CBA). In parallel, two spleens from C57BL/6 mice were dissected, and splenic CD4⁺ and CD8⁺ T-cells were isolated following instructions from a mouse T-cell isolation kit (StemCell Technologies). 200,000 isolated T-cells per well were then added to the transfected cells, with or without CD3c antibody (clone 145-2C11, BioLegend), at a final concentration of 0.5 μg/ml per well. At 24 and 48 hours post-addition of T-cells to the transfected cells, 100 μL of the co-culture supernatants were harvested from the wells for a flow-cytometry based cytokine bead array. Supernatants from transfected bone marrow macrophages (BMMs) and bone marrow macrophage/T-cell co-cultures were analyzed for their cytokine content, using murine anti-viral and murine Th1 specific cytokine bead arrays, respectively.

[1116] As shown in the table below, only the plasmids encoding muSTING-R283G elicited CXCL10 production from the macrophages, while plasmids encoding muIL-12p70, alone or in combination with other proteins, elicited the highest levels of IFNγ from the co-cultured T-cells, which were greater than the background amount resulting from CD3c stimulation. The combination of muIL-12p70+muIL-18+muSTING-R283G was able to induce both CXCL10 production from macrophages, and IFNγ production from co-cultured T-cells.

[1117] These data demonstrate the feasibility of expressing multiple immunomodulatory payloads from a single plasmid, as well as the synergistic activities of these combinations.

| | CXCL10 | IFNγ |
|---|---|---|
| | Production | Production |
| | by BMMs | By T-Cells |
| Constructs | (pg/mL) | (pg/mL) |
| Untransfected | 3.82 | 3170.28 |
| CMV-muIL-2 CO-WPRE | 5.92 | 7633.19 |
| EF-1α-muIL-12p70 | 12.24 | 11495.65 |
| CMV-muSTING-R283G | 662.03 | 1060.82 |
| CMV-muIL-2 CO + | 4.59 | 8511.19 |
| EF-1α-muIL-12p70 | | |
| CMV-muIL-15Rα-IL-15sc + | 5.82 | 11694.78 |
| EF-1α-muIL-12p70 | | |
| CMV-muIL-12p70_T2A_muSTING- | 324.92 | 9331.51 |
| R283G + EF-1α-muIL-18 | | |

### Combinatorial Immunotherapy Demonstrates Enhanced Anti-Tumor Activity in a Murine Model of Colorectal Adenocarcinoma

[1118] In order to determine whether tumor-specific delivery of a combination of cytokines enhances anti-tumor efficacy, a construct encoding the combination of muIL-12p70, muIL-18, and muSTING-R283G (CMV-muIL-12p70_T2A_muIL-18+EF-1α-muSTING-R283G-WPRE), was assessed in the MC38 murine model of colorectal adenocarcinoma. For this study, 6-8 week-old female C57BL/6 mice (5 mice per group) were inoculated SC in the right flank with MC38 colorectal adenocarcinoma cells (5×10⁵ cells in 100 μL PBS). Mice bearing established flank tumors were IV injected on day 10 with 1×10⁷ CFUs of strain YS1646Δasd/ΔFLG/ΔpagP/ΔansB, containing a plasmid encoding the combination of muIL-12p70, muIL-18, and muSTING-R283G (CMV-muIL-12p70_T2A_muIL-18+EF-1α-muSTING-R283G-WPRE), or with PBS vehicle control.

[1119] The combination therapy was very well tolerated, with only an initial weight loss of 3.6% that had fully recovered 3 days later. This is in marked contrast to the toxicities observed with systemic administration of these cytokines (IL-12p70 and IL-18). Compared to PBS control, the combination therapy was highly effective and curative (92.3% TGI, 60% cure rate, day 30). These data demonstrate the potency and safety of delivering combinations of cytokines in a tumor-specific manner, using the immunostimulatory bacterial strains described herein.

### Example 15

### Protein Engineering Screening to Identify Improved Gain-of-Function Mutations in STING, RIG-I, MDA5, IRF3, IRF7, and other Interferon Pathway Genes

[1120] Gain-of-function (GOF) amino acid mutants that are constitutively active and that promote interferonopathies are identified from humans. Many GOF mutations occur due to single base pair nucleotide changes that alter the amino acid codon at that particular position in the gene. For example, in STING, the V147L mutation occurs due to a mutation at c.439G→C; N154S occurs due to a mutation at c.461A→G; and V155M occurs due to a mutation at c.463G→A. The purpose of the screening was to identify constitutively active mutants that lead to high levels of type I interferon expression. Designed mutations, at sites known to promote interferonopathies when mutated in human patients, allow for a greater number of amino acid substitutions to be tested. In this example, site-directed mutagenesis with designed amino acids is performed at the positions of known mutations (see, Table below, listing mutations in genes that promote interferonopathies), to identify mutations with enhanced activity, that lead to high level type I interferon expression.

| Exemplary Normal Function Proteins | |
|---|---|
| in which the Mutations are Introduced | Gain-of-Function Mutations |
| STING/TMEM173 | S102P |
| (SEQ ID NOs: 305-309) | V147L |
| | V147M |
| | N154S |
| | V155M |
| | G166E |
| | C206Y |
| | G207E |
| | S102P/F279L |
| | F279L |
| | R281Q |
| | R284G |
| | R284S |
| | R284M |
| | R284K |
| | R284T |
| | R197A |
| | D205A |
| | R310A |
| | R293A |
| | T294A |
| | E296A |
| | R197A/D205A |
| | S272A/Q273A |
| | R310A/E316A |
| | E316A |
| | E316N |
| | E316Q |
| | S272A |
| | R375A |
| | R293A/T294A/E296A |
| | D231A |
| | R232A |
| | K236A |
| | Q273A |
| | S358A/E360A/S366A |
| | D231A/R232A/K236A/R238A |
| | S358A |
| | E360A |
| | S366A |
| | R238A |
| | S324A/S326A |
| MDA5/IFIH1 | T331I |
| (SEQ ID NO: 310) | T331R |
| | A489T |
| | R822Q |
| | G821S |
| | A946T |
| | R337G |
| | D393V |
| | G495R |
| | R720Q |
| | R779H |
| | R779C |
| | L372F |
| | A452T |
| RIG-I | E373A |
| (SEQ ID NO: 311) | C268F |

Amino acid residues R197, D205, R310, R293, T294, E296, S272, Q273, E316, D231, R232, K236, S358, E360, S366, and R238, with reference to the sequence of human STING, as set forth in SEQ ID NOs:305-309, correspond to amino acid residues R196, D204, R309, R292, T293, E295, S271, Q272, E315, D230, R231, K235, S357, E359, S365, and R237, respectively, with reference to the sequence of murine STING, as set forth in SEQ ID NO:369.

[1121] PCR primers are generated with designed substitutions flanked on the 5′ and 3′ ends with homologous cDNA sequences from the gene. The QuikChange® Site-Directed Mutagenesis kit (Agilent), or other comparable commercially available kit, is used to generate a PCR product incorporating the designed mutation. PCR amplified plasmids are treated with DpnI, then electroporated into competent E. coli cells. Individual clones are isolated, plasmid mini-preps are performed, and the sequence identity of the desired mutation is confirmed. Larger scale plasmid preparations are then performed (using a Qiagen Kit), and the DNA is transfected into HEK293T STING Reporter cells (InvivoGen), which do not contain endogenous STING. These cells express Lucia™ luciferase, a secreted luciferase, placed under the control of the endogenous IFN-β promoter; the coding sequence of IFN-β has been replaced by the Lucia™ luciferase ORF using knock-in technology. Constitutively activate mutants then are identified and ranked by measurement of IFN-β promoter induced expression of luciferase activity.

### Example 16

### Various Species of Immunostimulatory Bacteria with Inactivating Deletions Corresponding to the Deletions in Salmonella typhimurium

[1122] The Examples above describe exemplary modifications to the genome of Salmonella typhimurium to increase targeting to and accumulation of Salmonella typhimurium in immune-resident myeloid cells and in the tumor microenvironment, to deliver therapeutic products/payloads to tumors, and to reduce toxicity of the bacteria by eliminating their ability to infect other cell types. These genetic modifications similarly can be introduced into other bacterial strains and species, such as by deletion of the corresponding genes in other species, as described below.

Escherichia coli

[1123] In-frame chromosomal deletions of the lpxM, purM, asd, fliC, fliE, pagP, ansB and csgD genes are made sequentially in E. coli strains using a technique based on the recombineering methods described by Datsenko and Wanner (Proc. Natl. Acad. Sci. U.S.A. 97:6640-6645 (2000)). The genes in E. coli are as follows:

[1124] 1) lpxM, encoding myristoyl-acyl carrier protein-dependent acyltransferase [E. coli strain K-12, substrain MG1655; NCBI Gene ID: 945143];

[1125] 2) purM, encoding phosphoribosylformylglycinamide cyclo-ligase [E. coli strain K-12, substrain MG1655; NCBI Gene ID: 946975];

[1126] 3) asd, encoding aspartate-semialdehyde dehydrogenase [E. coli strain K-12, substrain MG1655; NCBI Gene ID: 947939];

[1127] 4) fliC, encoding flagellar filament structural protein [E. coli strain K-12, substrain MG1655; NCBI Gene ID: 949101];

[1128] 5) fliE, encoding flagellar basal-body protein FliE [E. coli strain K-12, substrain MG1655; NCBI Gene ID: 946446];

[1129] 6) pagP, encoding Lipid IVA palmitoyltransferase [E. coli strain K-12, substrain MG1655; NCBI Gene ID: 946360];

[1130] 7) ansB, encoding L-asparaginase 2 [E. coli strain K-12, substrain MG1655; NCBI Gene ID: 947454];

[1131] 8) csgD, encoding DNA-binding transcriptional dual regulator CsgD [E. coli strain K-12, substrain MG1655; NCBI Gene ID: 949119]; and

[1132] 9) rpsM, encoding 30S ribosomal subunit protein S13 (promoter) [E. coli strain K-12, substrain MG1655; NCBI Gene ID: 947791].

[1133] Briefly, a specific chromosomal sequence is replaced with a selectable antibiotic resistance marker flanked by homology arms, and is subsequently removed by a cre/loxP system. The 5′ and 3′ flanking sequences of each target gene are identified and cloned into a plasmid vector on opposing sides of an antibiotic resistance gene. The gene deletion cassette, containing the antibiotic resistance gene and flanking 5′ and 3′ homology arms is PCR amplified, gel purified, and introduced into the E. coli strain by electroporation. Electroporated cells are recovered, and transformants are selected for on antibiotic plates. The antibiotic marker is then cured using a cre/loxP recombination system, in which antibiotic resistant clones are transformed with a cre-expressing temperature-dependent plasmid. Colonies are selected at 30° C. and subsequently eliminated by serial passage at 42° C., and then screened for loss of antibiotic resistance. Antibiotic sensitive clones are confirmed for gene deletion by colony PCR and sequence analysis.

Increasing Resistance or Rendering E. coli Resistant to Human Complement

[1134] Expression of the Salmonella typhimurium rck (resistance to complement killing) gene, the Yersinia enterocolitica homolog ail (attachment invasion locus), or the Salmonella typhimurium pgtE (outer membrane serine protease) gene, in the E. coli ΔlpxM/ΔpurM/Δasd/ΔfliC/ΔfliE/ΔpagP/ΔansB/ΔcsgD strain is achieved by encoding the rck, ail, or pgtE gene sequence downstream from a constitutive promoter, such as E. coli or S. typhimurium rpsM, on a plasmid (asd complementation system compatible), or by insertion on the bacterial chromosome (at any of the lpxM, purM, asd, fliC, fliE, pagP, ansB, or csgD loci).

Salmonella typhi

[1135] In-frame chromosomal deletions of the msbB, purM, asd, fliC, flgB, pagP, ansB, and csgD genes are made sequentially in S. typhi strains using the technique described above for E. coli-based strains.

[1136] Expression of the Salmonella typhimurium rck (resistance to complement killing) gene, the Yersinia enterocolitica homolog ail, or the Salmonella typhimurium pgtE gene, in the S. typhi ΔmsbB/ΔpurM/Δasd/ΔfliC/ΔflgB/ΔpagP/ΔansB/ΔcsgD strain is achieved by encoding the rck, ail, or pgtE gene sequence downstream of a constitutive promoter, such as S. typhimurium or S. typhi rpsM, on a plasmid (asd complementation system compatible), or by insertion on the bacterial chromosome (at any of the msbB, purM, asd, fliC, flgB, pagP, ansB, or csgD loci). The genes in S. typhi are as follows:

[1137] 1) msbB (STY2097), encoding lipid A acyltransferase [Salmonella enterica subspecies enterica serovar Typhi, strain CT18; NCBI Gene ID: 1248440];

[1138] 2) purM (STY2740), encoding phosphoribosylformylglycinamidine cyclo-ligase [Salmonella enterica subspecies enterica serovar Typhi, strain CT18; NCBI Gene ID: 1249054];

[1139] 3) asd (STY4271), encoding aspartate-semialdehyde dehydrogenase [Salmonella enterica subspecies enterica serovar Typhi, strain CT18; NCBI Gene ID: 1250488];

[1140] 4) fliC (STY2167), encoding flagellin [Salmonella enterica subspecies enterica serovar Typhi, strain CT18; NCBI Gene ID: 1248507];

[1141] 5) flgB (STY1213), encoding flagellar basal-body rod protein FlgB [Salmonella enterica subspecies enterica serovar Typhi, strain CT18; NCBI Gene ID: 1247617];

[1142] 6) pagP (STY0677), encoding antimicrobial peptide resistance and lipid A acylation protein [Salmonella enterica subspecies enterica serovar Typhi, strain CT18; NCBI Gene ID: 1247137];

[1143] 7) ansB (STY3259), encoding L-asparaginase [Salmonella enterica subspecies enterica serovar Typhi, strain CT18; NCBI Gene ID: 1249541];

[1144] 8) csgD (STY1179), encoding regulatory protein CsgD [Salmonella enterica subspecies enterica serovar Typhi, strain CT18; NCBI Gene ID: 1247585]; and

[1145] 9) rpsM (STY4380), encoding 30S ribosomal subunit protein S13 (promoter) [Salmonella enterica subspecies enterica serovar Typhi, strain CT18; NCBI Gene ID: 1250594].

Listeria monocytogenes

[1146] In-frame chromosomal deletions of the purA, purQ, purS, asd, flaA, fliC, flgB, and ansB genes in Listeria monocytogenes is achieved by an allelic exchange technique using a temperature-sensitive shuttle vector, such as pKSV7, that confers antibiotic resistance and allows replication at low temperatures (30° C.), but is unable to replicate at higher temperature (43° C.). The 5′ and 3′ flanking sequences of each target gene are identified and cloned in tandem into the pKSV7 vector, which is transformed into recipient Listeria monocytogenes and selected for by plating on agar plates with antibiotic. Chromosomal integration of the plasmid is induced by serial passage of antibiotic-resistant transformants at 42° C. under selection. Subsequent sequential subculturing of the strain at 30° C. results in subpopulations of cells in which the plasmids are excised through a second crossover event, producing reversions to the original wild-type gene, or incorporation of the 5′ and 3′ flanking sequence homology arms to generate the targeted deletion mutant. Antibiotic sensitive clones are screened at this step by colony PCR and sequence analysis.

[1147] To increase complement resistance, expression of the Salmonella typhimurium rck (resistance to complement killing) gene, the Yersinia enterocolitica homolog ail, or the Salmonella typhimurium pgtE gene in the Listeria monocytogenes ΔpurA/ΔpurQ/ΔpurS/Δasd/ΔflaA/ΔfliC/ΔflgB/ΔansB strain is achieved by encoding the rck, ail, or pgtE gene sequence downstream of a constitutive promoter, such as P_{hyper} or Pₕₑₗₚₑᵣ, on a plasmid (asd complementation system compatible), or by insertion on the bacterial chromosome (at any of the purA, purQ, purS, asd, flaA, fliC, flgB, or ansB loci). The genes in L. monocytogenes are as follows:

[1148] 1) purA (lmo0055), encoding adenylosuccinate synthetase [Listeria monocytogenes strain EGD-e; NCBI Gene ID: 986069];

[1149] 2) purA (lmo1769), encoding phosphoribosylformylglycinamidine synthase II [Listeria monocytogenes strain EGD-e; NCBI Gene ID: 985972];

[1150] 3) purS (lmo1771), encoding phosphoribosylformylglycinamidine synthase subunit PurS [Listeria monocytogenes strain EGD-e; NCBI Gene ID: 985970];

[1151] 4) asd (lmo1437), encoding aspartate-semialdehyde dehydrogenase [Listeria monocytogenes strain EGD-e; NCBI Gene ID: 986492];

[1152] 5) flaA (lmo0690), encoding flagellin [Listeria monocytogenes strain EGD-e; NCBI Gene ID: 987167];

[1153] 6) fliE (lmo0712), encoding flagellar hook-basal body protein FliE [Listeria monocytogenes strain EGD-e; NCBI Gene ID: 985062];

[1154] 7) flgB (lmo0710), encoding flagellar basal-body rod protein FlgB [Listeria monocytogenes strain EGD-e; NCBI Gene ID 985059]; and

[1155] 8) ansB (lmo1663), encoding asparagine synthetase [Listeria monocytogenes strain EGD-e; NCBI Gene ID: 985663].

[1156] The genes msbB and pagP are absent in Listeria monocytogenes, which is a Gram-positive bacterium. CsgD also is absent in Listeria monocytogenes. Instead, Listeria express lcp, encoding the Listeria cellulose binding protein that is involved in biofilm formation, which also can be deleted.

Bifidobacterium longum

[1157] In-frame chromosomal deletions of BL1122 (purM), BL0492 (asd) and BL1142 (encoding an L-asparaginase precursor) in Bifidobacterium longum is achieved by an allelic exchange technique using an incompatible plasmid vector system, in which a conditional-replication vector, such as pBS423-ΔrepA, which lacks the plasmid replication gene, repA, is initially integrated into the genome, providing antibiotic resistance. A second plasmid, such as pTBR101-CM, encoding the repA gene, is subsequently transformed and facilitates a second crossover event that selects for excision of the initial integrant. The 5′ and 3′ flanking sequences of each target gene are identified and cloned in tandem into the conditional replication vector, lacking repA, and transformed into the Bifidobacterium longum ΔBL1122/ΔBL0492/ΔBL 1142 strain. Crossover recombination events can occur at homology arm sequences, and successful plasmid integrants are selected for and isolated on antibiotic plates. Integrants are then transformed with an incompatible plasmid encoding a functional copy of repA, which facilitates a second crossover event and excision of the repA deficient plasmid, which is subsequently lost due to plasmid incompatibility. Genomic deletions are confirmed by colony PCR and sequence analysis, and the remaining plasmid is cured by removing selection and subsequent Rif treatment.

[1158] Expression of the Salmonella typhimurium rck (resistance to complement killing) gene, the Yersinia enterocolitica homolog ail, or the Salmonella typhimurium pgtE gene in the Bifidobacterium longum ΔBL1122/ΔBL0492/ΔBL1142 strain is achieved by encoding the rck, ail, or pgtE gene sequence downstream of a strong constitutive promoter, such as P_{gap}, on a plasmid (asd complementation system compatible), or by insertion on the bacterial chromosome (at any of the BL1122, BL0492, or BL1142 loci). The Bifidobacterium longum genes are as follows:

[1159] 1) purM (BL1122), encoding phosphoribosylformylglycinamidine cyclo-ligase [Bifidobacterium longum strain NCC2705; NCBI Gene ID: 1022669];

[1160] 2) asd (BL0492), encoding aspartate-semialdehyde dehydrogenase [Bifidobacterium longum strain NCC2705; NCBI Gene ID: 1023089];

[1161] 3) BL1142, encoding an L-asparaginase precursor (Ntn_Asparaginase_2_like; L-Asparaginase type 2-like enzymes of the NTN-hydrolase superfamily) [Bifidobacterium longum strain NCC2705; NCBI Gene ID: 1023120]; and

[1162] 4) BL1363 gap (promoter) [Bifidobacterium longum strain NCC2705; NCBI Gene ID: 1022828].

[1163] Bifidobacterium longum are non-motile and lack flagellin, and are Gram-positive and lack msbB and pagP. The ansB gene is present, but encodes aspartate ammonia-lyase, which catalyzes the formation of fumarate from aspartate (aspA/ansB) [BL0338, Bifidobacterium longum strain NCC2705; NCBI Gene ID: 1023259].

Clostridium novyi

[1164] In-frame chromosomal deletions of NT01CX_RS09765, NT01CX_RS07625, and NT01CX_RS04325 (asd); the flagellin genes NT01CX_RS04995, NT01CX_RS04990, NT01CX_RS05070, and NT01CX_RS05075; and the flagellar basal body rod protein genes NT01CX_RS05080 (flgB), NT01CX_RS05085 (flgC), and NT01CX_RS05215 (flgG) in Clostridium is achieved by an allelic exchange technique requiring a counter-selection method including toxin-antitoxin systems, which requires an inducible promoter and toxic gene, such as the E. coli mRNA interferase mazF. The 5′ and 3′ flanking sequences of each target gene are identified and cloned in a configuration on opposing sides of a frt-flanked antibiotic resistance cassette in an allelic exchange counter-selection-containing vector, and transformed into Clostridium novyi. The mazF gene is encoded under the control of an inducible lac promoter on the allelic exchange vector, and permits selection of a double crossover event by growth on lactose-supplemented agar plates. Genomic deletions are confirmed by colony PCR and sequence analysis. Flp-frt recombination can then be used to cure the antibiotic resistance cassette from the chromosome.

[1165] Expression of the Salmonella typhimurium rck (resistance to complement killing) gene, the Yersinia enterocolitica homolog ail, or the Salmonella typhimurium pgtE gene in the Clostridium novyi ΔNT01CX_RS09765/4 NT01CX_RS07625/ΔNT01CX_RS04325/ΔNT01CX_RS04995/ΔNT01CX_RS04990/ΔNT01CX_RS05070/ΔNT01CX_RS05075/ΔNT01CX_RS05080/ΔNT01CX_RS050 85/ΔNT01CX_RS05215 strain is achieved by encoding the rck, ail, or pgtE gene sequence downstream from a strong constitutive promoter, such as Pₜₕ₁, P_{ptb}, or other variants, on a plasmid (asd complementation system compatible), or by insertion on the bacterial chromosome (at any of the NT01CX_RS09765, NT01CX_RS07625, NT01CX_RS04325, NT01CX_RS04995, NT01CX_RS04990, NT01CX_RS05070, NT01CX_RS05075, NT01CX_RS05080, NT01CX_RS05085, or NT01CX_RS05215 loci). The Clostridium novyi genes are as follows:

[1166] 1) NT01CX_RS09765, encoding AIR synthase [Clostridium novyi strain NT; NCBI Gene ID: 4541583];

[1167] 2) NT01CX_RS07625, encoding phosphoribosylformylglycinamidine cyclo-ligase [Clostridium novyi strain NT; NCBI Gene ID: 4540669];

[1168] 3) NT01CX_RS04325 (asd), encoding aspartate-semialdehyde dehydrogenase [Clostridium novyi strain NT; NCBI Gene ID: 4541762];

[1169] 4) NT01CX_RS04995, encoding flagellin [Clostridium novyi strain NT; NCBI Gene ID: 4541703];

[1170] 5) NT01CX_RS04990, encoding flagellin [Clostridium novyi strain NT; NCBI Gene ID: 4539984];

[1171] 6) NT01CX_RS05070, encoding flagellin [Clostridium novyi NT; NCBI Gene ID: 4539886];

[1172] 7) NT01CX_RS05075, encoding flagellin [Clostridium novyi NT; NCBI Gene ID: 4539699];

[1173] 8) NT01CX_RS05080 (flgB), encoding flagellar basal body rod protein FlgB [Clostridium novyi strain NT; NCBI Gene ID: 4540637];

[1174] 9) NT01CX_RS05085 (flgC), encoding flagellar basal body rod protein FlgC [Clostridium novyi strain NT; NCBI Gene ID: 4540143]; and

[1175] 10) NT01CX_RS05215 (flgG), encoding flagellar basal body rod protein FlgG [Clostridium novyi strain NT; NCBI Gene ID: 4540245].

[1176] Clostridium novyi is Gram-positive, and lacks msbB and pagP.

### Example 17

### Immunostimulatory Bacteria Modified to Express Vertebrate STING Variants that Induce Stronger Type I IFN Signaling and/or Weaker NF-κB Signaling than Human STING

[1177] STING signaling activates two signaling pathways. The first is the TANK binding kinase 1 (TBK1)/IRF3 axis, resulting in the induction of type I IFNs, and the activation of dendritic cells (DCs) and cross-presentation of tumor antigens to activate CD8⁺ T-cell mediated anti-tumor immunity. The second is the nuclear factor kappa-light-chain-enhancer of activated B-cell (NF-κB) signaling axis, resulting in a pro-inflammatory response, but not in the activation of the DCs and CD8⁺ T-cells that are required for anti-tumor immunity. Bacterially-based cancer immunotherapies are limited in their ability to induce type I IFN to recruit and activate the CD8⁺ T-cells that are necessary to promote tumor antigen cross-presentation and durable anti-tumor immunity. Hence, provided are immunostimulatory bacteria herein that induce and/or increase type I IFN signaling, and that have decreased NF-κB signaling, thereby increasing the induction of CD8⁺ T-cell mediated anti-tumor immunity, and enhancing the therapeutic efficacy of the bacteria. The immunostimulatory bacteria described above encode modified STING proteins that are gain-of-function mutants of STING that can increase induction of type I IFN compared to wild-type STING, or render the expression of type I IFN constitutive. In this example (and also described in the detailed description), the STING protein is modified to reduce or eliminate NF-κB signaling activity, and to retain the ability to induce type I IFN, and/or is modified for increased or constitutive type I IFN expression. This results in immunostimulatory bacteria that induce anti-tumor immunity, and do not induce (or induce less) NF-κB signaling that normally results from infection by bacterial pathogens.

[1178] STING proteins from different species exhibit different levels of type I IFN and NF-κB signaling activities. For example, STING signaling in human and mouse cells results in a strong type I IFN response, and a weak pro-inflammatory NF-κB response. STING signaling in ray-finned fish, such as salmon and zebrafish, in comparison, elicits robust activation of a primarily NF-κB-driven response, that is more than 100-fold higher compared with the IRF3-driven (i.e., type I IFN inducing) response. In other species, such as Tasmanian devil, STING signaling results in a type I IFN response, but essentially no NF-κB response. The immunostimulatory bacteria provided herein encode STING from non-human species, such as Tasmanian devil STING, in order to exploit the ability of STING to induce a type I IFN response, but without the concomitant induction of an NF-κB response. As described herein, these non-human STING proteins also are modified by mutation to increase the type I IFN response, or to render it constitutive. The identified mutations that have this effect in human STING are introduced into the non-human STING proteins. The corresponding residues are identified by alignment.

[1179] Also provided are chimeras in which the C-terminal tail (CTT) of STING is replaced in one species, such as human, with the CTT from a second (e.g., non-human) species STING protein that exhibits little or no NF-κB signaling activity. The CTT is an unstructured stretch of approximately 40 amino acids that contains sequence motifs required for STING phosphorylation and recruitment of IRF3. It can shape downstream immunity by altering the balance between type I IFN and NF-κB signaling. This is controlled through independent modules in the CTT, including IRF3-, TBK1-, and TRAF6-binding modules. For example, human STING residue S366 (see, e.g., SEQ ID NOs:305-309) is a primary TBK1 phosphorylation site that is part of an LxIS motif in the CTT, which is required for IRF3 binding, while a second PxPLR motif, including residue L374, is required for TBK1 binding. The LxIS and PxPLR motifs are highly conserved in all vertebrate STING alleles. Replacing the CTT of human STING with that of, for example, Tasmanian devil STING, produces a STING variant that induces a type I IFN response, but not an NF-κB response.

[1180] In this Example, the immunostimulatory bacteria are engineered to express a STING variant with increased type I IFN signaling, and/or reduced NF-κB signaling, compared to wild-type (WT) human STING (see, e.g., SEQ ID NOs:305-309). The STING variants can be from a non-human vertebrate, such as a mammalian, bird, reptilian, amphibian, or fish species. Species from which the non-human STING proteins are derived include, but are not limited to, Tasmanian devil (Sarcophilus harrisii; SEQ ID NO:349), marmoset (Callithrix jacchus; SEQ ID NO:359), cattle (Bos taurus; SEQ ID NO:360), cat (Felis catus; SEQ ID NO:356), ostrich (Struthio camelus australis; SEQ ID NO:361), crested ibis (Nipponia nippon; SEQ ID NO:362), coelacanth (Latimeria chalumnae; SEQ ID NOs:363-364), boar (Sus scrofa; SEQ ID NO:365), bat (Rousettus aegyptiacus; SEQ ID NO:366), manatee (Trichechus manatus latirostris; SEQ ID NO:367), ghost shark (Callorhinchus milli; SEQ ID NO:368), and mouse (Mus musculus; SEQ ID NO:369). These vertebrate STING proteins readily activate immune signaling in human cells, indicating that the molecular mechanism of STING signaling is shared in vertebrates (see, e.g., de Oliveira Mann et al. (2019) Cell Reports 27:1165-1175). STING proteins from these species induce less NF-κB signal activation and/or more type I IFN signal activation, than human STING (see, e.g., de Oliveira Mann et al. (2019), FIG. 1A). Wild-type or modified STING proteins from different non-human species can be expressed by the immunostimulatory bacteria herein, as can chimeras of human and non-human STING proteins.

[1181] The various non-human STING proteins are modified, such that the non-human STING has lower NF-κB activation, and, optionally, higher type I interferon activation, than human STING. These non-human STING proteins are modified to include a mutation or mutations so that they have increased type I IFN activity, or act constitutively, in the absence of cytosolic nucleic acid ligands (e.g., CDNs). The mutations typically are amino acid mutations, such as gain-of-function mutations, that are associated with interferonopathies in humans. The corresponding mutations are introduced into the non-human species STING proteins, where corresponding amino acid residues are identified by alignment. For example, mutations include, but are not limited to, S102P, V147L, V147M, N154S, V155M, G166E, C206Y, G207E, S102P/F279L, F279L, R281Q, R284G, R284S, R284M, R284K, R284T, R197A, D205A, R310A, R293A, T294A, E296A, R197A/D205A, S272A/Q273A, R310A/E316A, E316A, E316N, E316Q, S272A, R293A/T294A/E296A, D231A, R232A, K236A, Q273A, S358A/E360A/S366A, D231A/R232A/K236A/R238A, S358A, E360A, S366A, R238A, R375A, and S324A/S326A, with reference to the sequence of human STING, as set forth in SEQ ID NOs:305-309. Corresponding mutations in STING from other species are listed in the tables below. The resulting variants of the non-human STING proteins include one or more of these mutations, and optionally, a CTT replacement, and optionally, a deletion in the TRAF6 binding site.

[1182] The STING variants include one or more replacements of the amino acid serine (S) or threonine (T) at a phosphorylation site, with aspartic acid (D), which is phosphomimetic, resulting in increased or constitutive activity. Other mutations include deletion or replacement of a phosphorylation site or sites, such as 324-326 SLS→ALA in STING, and other replacements to eliminate a phosphorylation site to reduce NF-κB signaling in STING. Additionally, chimeras of human STING with STING from other species are provided, in which the C-terminal tail (CTT) of human STING is replaced with the CTT of STING from another species that has lower NF-κB signaling activity, and/or higher type I IFN signaling activity. The variant STING proteins can include a deletion in the TRAF6 binding site of the CTT, to reduce NF-κB signaling.

| Human | Tasmanian | | | | | Crested | |
|---|---|---|---|---|---|---|---|
| STING | devil | Marmoset | Cattle | Cat | Ostrich | ibis | Coelacanth |
| (SEQ ID | STING | STING | STING | STING | STING | STING | STING |
| NOs: 305- | (SEQ ID | (SEQ ID | (SEQ ID | (SEQ ID | (SEQ ID | (SEQ ID | (SEQ ID |
| 309) | NO: 349) | NO: 359) | NO: 360) | NO: 356) | NO: 361) | NO: 362) | NO: 363) |
| S102P | S102P | S102P | S102P | S102P | C107P | V106P | A102P |
| V147L | V147L | V145L | I147L | V146L | M152L | M151L | I147L |
| V147M | V147M | V145M | I147M | V146M | — | — | I147M |
| N154S | N154S | N152S | N154S | N153S | N159S | N158S | G154S |
| V155M | V155M | V153M | V155M | V154M | V160M | V159M | V155M |
| G166E | G166E | G164E | G166E | G165E | G171E | G170E | G166E |
| C206Y | C206Y | C204Y | C206Y | C205Y | C211Y | C210Y | C206Y |
| G207E | S207E | G205E | G207E | G206E | N212E | D211E | S207E |
| S102P/ | S102P/ | S102P/ | S102P/ | S102P/ | C107P/ | V106P/ | A102P/ |
| F279L | F279L | F277L | F279L | F278L | F283L | F283L | F279L |
| F279L | F279L | F277L | F279L | F278L | F283L | F283L | F279L |
| R281Q | R281Q | R279Q | R281Q | R280Q | R285Q | R285Q | K281Q |
| R284G | R284G | R282G | R284G | R283G | R288G | R288G | R284G |
| R284S | R284S | R282S | R284S | R283S | R288S | R288S | R284S |
| R284M | R284M | R282M | R284M | R283M | R288M | R288M | R284M |
| R284K | R284K | R282K | R284K | R283K | R288K | R288K | R284K |
| R284T | R284T | R282T | R284T | R283T | R288T | R288T | R284T |
| R197A | R197A | R195A | R197A | R196A | K202A | K201A | R197A |
| D205A | D205A | D203A | D205A | D204A | S210A | S209A | S205A |
| R310A | R310A | R308A | R310A | R309A | R314A | R314A | R310A |
| R293A | R293A | R291A | R293A | R292A | R297A | R297A | R293A |
| T294A | T294A | T292A | T294A | I293A | T298A | T298A | T294A |
| E296A | E296A | E294A | E296A | E295A | E300A | E300A | K296A |
| R197A/ | R197A/ | R195A/ | R197A/ | R196A/ | K202A/ | K201A/ | R197A/ |
| D205A | D205A | D203A | D205A | D204A | S210A | S209A | S205A |
| S272A/ | S272A/ | S270A/ | S272A/ | S271A/ | S276A/ | S276A/ | S272A/ |
| Q273A | Q273A | Q271A | Q273A | Q272A | Q277A | Q277A | K273A |
| R310A/ | R310A/ | R308A/ | R310A/ | R309A/ | R314A/ | R314A/ | R310A/ |
| E316A | E316A | E314A | E316A | E315A | E320A | E320A | E318A |
| E316A | E316A | E314A | E316A | E315A | E320A | E320A | E318A |
| E316N | E316N | E314N | E316N | E315N | E320N | E320N | E318N |
| E316Q | E316Q | E314Q | E316Q | E315Q | E320Q | E320Q | E318Q |
| S272A | S272A | S270A | S272A | S271A | S276A | S276A | S272A |
| R375A | R377A | R373A | R374A | R373A | R371A | R379A | K376A |
| R293A/ | R293A/ | R291A/ | R293A/ | R292A/ | R297A/ | R297A/ | R293A/ |
| T294A/ | T294A/ | T292A/ | T294A/ | I293A/ | T298A/ | T298A/ | T294A/ |
| E296A | E296A | E294A | E296A | E295A | E300A | E300A | K296A |
| D231A | D231A | D229A | D231A | D230A | T236A | T235A | N231A |
| R232A | R232A | R230A | R232A | R231A | R237A | R236A | R232A |
| K236A | K236A | K234A | K236A | K235A | K241A | K240A | K236A |
| Q273A | Q273A | Q271A | Q273A | Q272A | Q277A | Q277A | K273A |
| S358A/ | S360A/ | S356A/ | S357A/ | S356A/ | S354A/ | S362A/ | S359A/ |
| E360A/ | E362A/ | E358A/ | E359A/ | E358A/ | D356A/ | E364A/ | E361A/ |
| S366A | S368A | S364A | S365A | S364A | S362A | S370A | S367A |
| D231A/ | D231A/ | D229A/ | D231A/ | D230A/ | T236A/ | T235A/ | N231A/ |
| R232A/ | R232A/ | R230A/ | R232A/ | R231A/ | R237A/ | R236A/ | R232A/ |
| K236A/ | K236A/ | K234A/ | K236A/ | K235A/ | K241A/ | K240A/ | K236A/ |
| R238A | R238A | R236A | R238A | R237A | R243A | R242A | R238A |
| S358A | S360A | S356A | S357A | S356A | S354A | S362A | S359A |
| E360A | E362A | E358A | E359A | E358A | D356A | E364A | E361A |
| S366A | S368A | S364A | S365A | S364A | S362A | S370A | S367A |
| R238A | R238A | R236A | R238A | R237A | R243A | R242A | R238A |
| S324A/ | S326A/ | L322A/ | S324A/ | S323A/ | F328A/ | S328A/ | S327A |
| S326A | S328A | S324A | S326A | S325A | S330A | S330A | |

| Human | | | | Ghost | |
|---|---|---|---|---|---|
| STING | Boar | Bat | Manatee | Shark | Mouse |
| (SEQ ID | STING | STING | STING | STING | STING |
| NOs: | (SEQ ID | (SEQ ID | (SEQ ID | (SEQ ID | (SEQ ID |
| 305-309) | NO: 365) | NO: 366) | NO: 367) | NO: 368) | NO: 369) |
| S102P | S102P | S103P | S105P | S98P | S102P |
| V147L | I147L | V148L | I150L | I148L | V146L |
| V147M | I147M | V148M | I150M | I148M | V146M |
| N154S | N154S | N155S | N157S | N155S | N153S |
| V155M | V155M | V156M | V158M | V156S | V154M |
| G166E | G166E | G167E | G169E | G167E | G165E |
| C206Y | C206Y | C207Y | C209Y | C206Y | C205Y |
| G207E | G207E | G208E | G210E | K207E | G206E |
| S102P/ | S102P/ | S103P/ | S105P/ | S98P/ | S102P/ |
| F279L | F279L | F280L | F282L | F280L | F278L |
| F279L | F279L | F280L | F282L | F280L | F278L |
| R281Q | R281Q | — | R284Q | K282Q | R280Q |
| R284G | R284G | R285G | R287G | R285G | R283G |
| R284S | R284S | R285S | R287S | R285S | R283S |
| R284M | R284M | R285M | R287M | R285M | R283M |
| R284K | R284K | R285K | R287K | R285K | R283K |
| R284T | R284T | R285T | R287T | R285T | R283T |
| R197A | R197A | R198A | R200A | K197A | R196A |
| D205A | D205A | D206A | D208A | S205A | D204A |
| R310A | R310A | R311A | R313A | R311A | R309A |
| R293A | R293A | R294A | R296A | R294A | R292A |
| T294A | T294A | T295A | T297A | T295A | T293A |
| E296A | E296A | — | E299A | K297A | E295A |
| R197A/ | R197A/ | R198A/ | R200A/ | K197A/ | R196A/ |
| D205A | D205A | D206A | D208A | S205A | D204A |
| S272A/ | S272A/ | S273A/ | S275A/ | T273A/ | S271A/ |
| Q273A | Q273A | Q274A | Q276A | N274A | Q272A |
| R310A/ | R310A/ | R311A/ | R313A/ | R311A/ | R309A/ |
| E316A | E316A | E317A | E319A | D317A | E315A |
| E316A | E316A | E317A | E319A | D317A | E315A |
| E316N | E316N | E317N | E319N | D317N | E315N |
| E316Q | E316Q | E317Q | E319Q | D317Q | E315Q |
| S272A | S272A | S273A | S275A | T273A | S271A |
| R375A | S374A | R376A | R383A | R374A | R374A |
| R293A/ | R293A/ | R294A/ | R296A/ | R294A/ | R292A/ |
| T294A/ | T294A/ | T295A | T297A/ | T295A/ | T293A/ |
| E296A | E296A | | E299A | K297A | E295A |
| D231A | D231A | D232A | D234A | D231A | D230A |
| R232A | R232A | R233A | C235A | R232A | R231A |
| K236A | K236A | K237A | K239A | K236A | K235A |
| Q273A | Q273A | Q274A | Q276A | N274A | Q272A |
| S358A/ | S357A/ | H359A/ | S366A/ | S359A/ | S357A/ |
| E360A/ | E359A/ | E361A/ | E368A/ | E361A/ | E359A/ |
| S366A | S365A | S367A | S374A | S367A | S365A |
| D231A/ | D231A/ | D232A/ | D234A/ | D231A/ | D230A/ |
| R232A/ | R232A/ | R233A/ | C235A/ | R232A/ | R231A/ |
| K236A/ | K236A/ | K237A/ | K239A/ | K236A/ | K235A/ |
| R238A | R238A | R239A | R241A | R238A | R237A |
| S358A | S357A | H359A | S366A | S359A | S357A |
| E360A | E359A | E361A | E368A | E361A | E359A |
| S366A | S365A | S367A | S374A | S367A | S365A |
| R238A | R238A | R239A | R241A | R238A | R237A |
| S324A/ | S324A/ | S325A/ | S327A/ | G325A/ | S323A/ |
| S326A | S326A | S327A | S329A | S330A | S325A |

[1183] For example, modified STING variants include Tasmanian devil STING with the mutations C206Y (SEQ ID NO:350), or R284G (SEQ ID NO:351); a variant in which the CTT of human STING is replaced with the CTT of Tasmanian devil STING (SEQ ID NO:352); human STING with the mutation C206Y (SEQ ID NO:353), or R284G (SEQ ID NO:354), and where the CTT is replaced with the CTT of Tasmanian devil STING; wild-type human STING with a deletion in the TRAF6 binding domain (corresponding to residues 377-379 (DFS)) (SEQ ID NO:355); cat STING with the mutations C205Y (SEQ ID NO:357), or R283G (SEQ ID NO:358); and other such modified STING variants.

[1184] To determine the corresponding amino acid residues for the STING mutations, the wild-type STING protein sequences from various non-human species each were aligned with the wild-type human STING protein sequence (of the allelic variants of SEQ ID NO:305 (R232 allele) or SEQ ID NO:306 (H232 allele)). The alignments were performed using the Kalign sequence alignment tool, available from ebi.ac.uk/Tools/msa/kalign/, or the EMBOSS needle sequence alignment tool, available from ebi.ac.uk/Tools/psa/emboss_needle/. FIGS. 1-13 depict exemplary sequence alignments for human STING compared to STING proteins from Tasmanian devil, marmoset, cattle, cat, ostrich, crested ibis, coelacanth, zebrafish, boar, bat, manatee, ghost shark, and mouse species, respectively.

### STING GOF Hybrid Variants Demonstrate Significantly Enhanced Type I Interferon to NF-κB Activity Ratios in Dendritic Cells

[1185] In order to determine the optimal STING GOF mutant that would elicit the highest levels of the CD8⁺ T-cell chemokine CXCL10 in mice, a panel of STING mutants were tested in murine primary bone marrow-derived dendritic cells (BMDCs). These included the Tasmanian devil STING with the constitutive human GOF mutations C206Y (tazSTING C206Y; SEQ ID NO:350), or R284G (tazSTING R284G; SEQ ID NO:351); murine STING with the constitutive GOF mutants C205Y (muSTING C205Y; SEQ ID NO:399), or R283G (muSTING R283G; SEQ ID NO:400); cat STING with the constitutive GOF mutants C205Y (catSTING C205Y; SEQ ID NO:357), or R283G (catSTING R283G; SEQ ID NO:358); as well as variants in which the CTT of human STING (SEQ ID NO:370) was replaced with the CTT of Tasmanian devil STING (SEQ ID NO:371), and containing either wild-type human STING (huSTING tazCTT; see, e.g., SEQ ID NO:352), or the human STING GOF mutations C206Y (huSTING C206Y tazCTT; see, e.g., SEQ ID NO:353), or R284G (huSTING R284G tazCTT; see, e.g., SEQ ID NO:354). Also included were human STING variants with the constitutive, GOF mutations C206Y (huSTING C206Y), or R284G (huSTING R284G).

[1186] To test these, murine bone marrow was isolated and flushed into 1.5 mL Eppendorf tubes, and spun at 1200 RPM for 5 minutes, to collect the bone marrow cells. Cells were washed once in RPMI-1640+10% FBS, then seeded in 96-well TC-treated plates in RPMI-1640+10% FBS with 20 ng/ml GM-CSF. Every 2 days, 50% of the medium was replaced with fresh complete media. After six days, non-adherent cells were pipetted off the wells and re-seeded at 1e5 cells per well in RPMI-1640+10% FBS in a 96-well plate for transfection. Cells were transfected using Viromer® RED, according to the manufacturer's instructions. Briefly, 200 ng of plasmid DNA from a panel of STING GOF mutants, as well as untransfected control, were diluted in the provided buffer, and mixed with 0.08 μL of Viromer® RED and incubated at room temperature for 15 minutes to allow the DNA. Viromer® RED complexes to form. The DNA/Viromer® RED complexes were then slowly added to each well of the 96-well plate (in duplicates), and the plate was incubated at 37° C. in a CO₂ incubator. Supernatants were harvested at 48 hours, and assayed for murine CXCL10 (IP-10) using a flow cytometry-based cytokine bead array (CBA), according to the manufacturer's protocol.

[1187] As shown in the table below, the construct that induced the highest expression of murine CXCL10 was human STING containing the GOF mutation R284G, and containing a replacement of the CTT of human STING with the CTT of Tasmanian devil STING (huSTING R284G tazCTT). The next highest expression of CXCL10 was induced by the human STING variant containing the GOF mutation C206Y (huSTING C206Y), and the Tasmanian devil STING construct containing the human STING GOF mutation R284G (tazSTING R284G). The human STING GOF mutants (huSTING C206Y and huSTING R284G) were more potent than the corresponding murine STING GOF mutants (muSTING C205Y and muSTING R283G, respectively), which were even less potent than the cat STING mutants containing the same GOF mutations (catSTING C205Y and catSTING R283G, respectively), in primary murine dendritic cells.

| Construct | muCXCL10 (pg/mL) |
|---|---|
| Untransfected | 11.48 ± 3.889 |
| huSTING C206Y | 861.0 ± 58.48 |
| huSTING R284G | 769.7 ± 95.16 |
| muSTING C205Y | 194 ± 27.15 |
| muSTING R283G | 230.1 ± 1.018 |
| huSTING C206Y tazCTT | 366.6 ± 42.61 |
| huSTING R284G tazCTT | 1326 ± 137.9 |
| tazSTING C206Y | 808.8 ± 95.78 |
| tazSTING R284G | 831.3 ± 30.15 |
| catSTING C205Y | 480.7 ± 24.94 |
| catSTING R283G | 376.2 ± 6.682 |

[1188] These data demonstrate that STING proteins obtained from other species, such as Tasmanian devil, can be combined with constitutive GOF human STING mutations, to elicit potent T-cell recruiting chemokines.

### STING GOF Hybrid Variants Demonstrate Significantly Enhanced Type I Interferon to NF-κB Activity Ratios in Human Monocytes

[1189] In order to demonstrate that the ratio of STING-induced type I interferon to NF-κB signaling can be altered using STING GOF hybrid variants from other species, a panel was tested in a human monocyte cell line. The panel included wild-type human STING (huSTING), and huSTING mutants with the constitutive human GOF mutations C206Y, or R284G; wild-type Tasmanian devil STING (tazSTING), and tazSTING mutants with the constitutive GOF mutations C206Y, or R284G; wild-type cat STING, and catSTING mutants with the constitutive GOF mutations C205, or R283G; murine STING mutants with the constitutive GOF mutations C205Y, or R283G; and the variants in which the CTT of human STING was replaced with the CTT of Tasmanian devil STING, and containing either wild-type human STING, or the human GOF STING mutations C206Y, or R284G. Also included were a wild-type human STING with a deletion in the TRAF6 binding domain (corresponding to residues 377-379, DFS, see, e.g., SEQ ID NO:355), and wild-type zebrafish STING.

[1190] For this experiment, the THP1-Dual™ KO STING cells were utilized, which have been altered to lack endogenous STING, and to also express Lucia™ luciferase, a secreted luciferase, placed under the control of the endogenous IFN-β promoter. Constitutively active STING GOF mutants then were identified, and ranked by measurement of IFN-β promoter induced expression of luciferase activity. These cells also express secreted embryonic alkaline phosphatase (SEAP), placed under the control of the endogenous NF-κB promoter, where the coding sequence of NF-κB has been replaced by the SEAP ORF using knock-in technology. NF-κB activity induced by STING GOF mutants can be assessed by monitoring SEAP production in the cell supernatants.

[1191] For this experiment, THP1-Dual™ KO STING cells were transfected using Viromer® RED, according to the manufacturer's instructions. Briefly, 200 ng of plasmid DNA from a panel of STING GOF mutants, as well as untransfected control, were diluted in the provided buffer, and mixed with 0.08 μL of Viromer® RED and incubated at room temperature for 15 minutes to allow the DNA/Viromer® RED complexes to form. The DNA/Viromer® RED complexes were then slowly added to each well of the 96-well plate (in duplicates), and the plate was incubated at 37° C. in a CO₂ incubator. In addition, the wild-type STING variants were treated with or without the STING agonist 3′5′ RpRp c-di-AMP (CDN, InvivoGen), an analog of the clinical compound ADU-S100, which was added to the cells after 24 hours of incubation at 10 μg/mL. Supernatants were harvested at 48 hours, and assayed for NF-κB-SEAP and IFN-Lucia reporter signals, according to the manufacturer's protocol. Briefly, 10 μL of the cell culture supernatants was added to 50 QUANTI-Blue™ reagent (InvivoGen) (which is used for measuring SEAP). NF-κB activation was determined by measuring NF-κB-induced SEAP activity on a SpectraMax® M3 Spectrophotometer (Molecular Devices), at an absorbance (Abs) wavelength of 650 nm. For measuring type I interferon activity from IFN-Lucia, 10 μL of the cell culture supernatants was added to 50 μL QUANTI-Luc™, containing the coelenterazine substrate for the luciferase reaction, which produces a light signal that is quantified using a SpectraMax® M3 luminometer, and expressed as relative light units (RLUs).

[1192] As shown in the table below, the highest type I IFN responses were observed from the variant in which the CTT of human STING was replaced with the CTT of Tasmanian devil STING, and that contained the human STING GOF mutation R284G (huSTING R284G tazCTT), as well as from the wild-type zebrafish STING with the CDN STING agonist (zfSTING WT+CDN). However, unlike the wild-type zebrafish STING, which had very high NF-κB signaling, the huSTING R284G tazCTT variant had high type I IFN signaling with much lower NF-κB signaling activity. The best ratio of higher type I IFN to lower NF-κB signaling was found with the Tasmanian devil STING variant containing the human STING GOF mutation R284G (tazSTING R284G).

| | ISRE- | | NF-κB- | |
|---|---|---|---|---|
| | Lucia ™ | | SEAP | |
| STING Variant | (RLUs) | ±SD | (Abs) | ±SD |
| Untransfected | 47.96 | 33.91 | 0.065 | 0.007 |
| huSTING WT + CDN | 170.8 | 38.15 | 0.100 | 0.014 |
| huSTING WT delTRAF6 + CDN | 164.8 | 8.48 | 0.120 | 0.014 |
| huSTING WT tazCTT + CDN | 31.47 | 10.59 | 0.060 | 0.000 |
| tazSTING WT + CDN | 143.9 | 4.24 | 0.090 | 0.014 |
| zfSTING WT + CDN | 310.2 | 23.31 | 0.690 | 0.028 |
| CMV catSTING WT WPRE + CDN | 202.3 | 6.36 | 0.125 | 0.007 |
| huSTING C206Y | 175.3 | 36.03 | 0.105 | 0.007 |
| huSTING R284G | 143.9 | 29.67 | 0.100 | 0.000 |
| huSTING C206Y tazCTT | 137.9 | 21.19 | 0.095 | 0.007 |
| huSTING R284G tazCTT | 301.2 | 61.46 | 0.250 | 0.127 |
| tazSTING C206Y | 199.3 | 2.12 | 0.120 | 0.000 |
| tazSTING R284G | 217.3 | 19.08 | 0.105 | 0.007 |
| muSTING C205Y | 43.46 | 2.12 | 0.070 | 0.000 |
| muSTING R283G | 32.97 | 4.24 | 0.070 | 0.000 |
| catSTING C205Y | 202.3 | 23.31 | 0.135 | 0.007 |
| catSTING R283G | 157.4 | 10.60 | 0.120 | 0.000 |

SD = Standard deviation

[1193] These data further demonstrate using non-human STING proteins, such as the STING protein from Tasmanian devil, and combining them with human constitutive gain-of-function STING mutations, in order to enhance the beneficial type I interferon activity, while minimizing the immunosuppressive NF-κB activity, in human monocytes.

### Example 18

### S. typhimurium Lipoprotein Knockout by Deletion of the lppA and lppB Genes

[1194] The live attenuated S. typhimurium YS1646 strain, containing the Δasd/ΔFLG/ΔpagP/ΔansB/ΔcsgD gene deletions, was engineered to delete the lppA (SEQ ID NO:387) and lppB (SEQ ID NO:388) genes, in order to remove membrane surface lipoproteins. This reduces pro-inflammatory TLR2 activation, which reduces immunosuppressive cytokines and improves anti-tumor adaptive immunity. As shown below, this also enhances plasmid delivery and encoded protein expression in the tumor.

### Strain Engineering and Characterization

[1195] Deletion of lppA Gene

[1196] The lppA gene was deleted from the chromosome of the YS1646Δasd/ΔFLG/ΔpagP/ΔansB/ΔcsgD strain using modifications of the method of Datsenko and Wanner (Proc. Natl. Acad. Sci. U.S.A. 97:6640-6645 (2000)), as described in detail above. Synthetic lppA gene homology arm sequences that contained 231 and 200 bases of the left hand and right hand sequence, respectively, flanking the lppA gene, were synthesized and cloned into a plasmid called pSL0148 (SEQ ID NO:231). The sequence for the lppA gene is shown in SEQ ID NO:387; appropriate primers for PCR amplification were designed using the gene sequence. A kanamycin gene cassette flanked by cre/loxP sites then was cloned into plasmid pSL0148, and the lppA gene knockout cassette was then PCR amplified with primers lppA-1 and lppA-2, gel purified, and then introduced into the YS1646Δasd/ΔFLG/ΔpagP/ΔansB/ΔcsgD strain carrying the temperature sensitive lambda red recombination plasmid pKD46, by electroporation. Electroporated cells were recovered in SOC+DAP medium, and plated onto LB agar plates supplemented with kanamycin (20 μg/mL) and diaminopimelic acid (DAP, 50 μg/mL). Colonies were selected and screened for insertion of the knockout fragment by PCR using primers lppA-3 and lppA-4. pKD46 then was cured by culturing the selected kanamycin resistant strain at 42° C., and screening for loss of ampicillin resistance. The kanamycin resistance marker then was cured by electroporation of a temperature-sensitive plasmid expressing the Cre recombinase (pJW168), and Amp^{R} colonies were selected at 30° C.; pJW168 was subsequently eliminated by growing cultures at 42° C. Selected lppA knockout clones were then tested for loss of the kanamycin marker by PCR, using primers flanking the sites of disruption (lppA-3 and lppA-4), and evaluation of the electrophoretic mobility was performed on agarose gels. This mutant derivative of strain YS1646 was designated YS1646Δasd/ΔFLG/ΔpagP/ΔansB/ΔcsgD/ΔlppA.

[1197] Deletion of lppB Gene

[1198] The lppB gene then was deleted in the YS1646Δasd/ΔFLG/ΔpagP/ΔansB/ΔcsgD/ΔlppA strain using modifications of the methods described above. Synthetic lppB gene homology arm sequences that contained 224 and 231 bases of the left hand and right hand sequence, respectively, flanking the lppB gene, were synthesized and cloned into a plasmid called pSL0148 (SEQ ID NO:231). The sequence for the lppB gene is shown in SEQ ID NO:388; appropriate primers for PCR amplification were designed using the gene sequence. A kanamycin gene cassette flanked by cre/loxP sites then was cloned into plasmid pSL0148, and the lppB gene knockout cassette was PCR amplified with primers lppB-5 and lppB-6, gel purified, and introduced into strain YS1646Δasd/ΔFLG/ΔpagP/ΔansB/ΔcsgD/ΔlppA carrying the temperature-sensitive lambda red recombination plasmid pKD46 by electroporation. The kanamycin resistance gene then was cured by Cre-mediated recombination as described above, and the temperature-sensitive plasmids were cured by growth at non-permissive temperature. The lppA and lppB gene knockout sequences were amplified by PCR, using primers designated lppA-3 and lppA-4, and lppB-7 and lppB-8, respectively, and verified by DNA sequencing. This mutant derivative of strain YS1646 was designated YS1646Δasd/ΔFLG/ΔpagP/ΔansB/ΔcsgD/ΔlppAB, or nicknamed YS1646ΔlppAB.

In vitro Characterization of Engineered S. typhimurium Lipoprotein Knockout Strain

[1199] The YS1646Δasd/ΔFLG/ΔpagP/ΔansB/ΔcsgD/ΔlppAB strain, harboring the deletions of lppA and lppB, was evaluated for growth by overnight cultures in LB. Growth was measured using a SpectraMax® M3 Spectrophotometer (Molecular Devices) at 37° C., reading the OD₆₀₀ every 15 minutes. The results demonstrated that strain YS1646Δasd/ΔFLG/ΔpagP/ΔansB/ΔcsgD/ΔlppAB was able to replicate in LB at a growth rate comparable to the parental YS1646Δasd/ΔFLG/ΔpagP/ΔansB/ΔcsgD strain. These data demonstrate that the elimination of lipoprotein does not decrease the fitness of S. typhimurium in vitro.

### Lipoprotein Deletion Enhances Plasmid Delivery to the Tumor After Systemic Administration

[1200] As TLR2 is expressed on vascular endothelial cells, and activation of TLR2 enhances vascular permeability, the effect of ΔlppAB, and the subsequent reduction in TLR2 agonism, on tumor colonization was assessed. The effect on payload expression also was assessed. As shown below, while colonization of tumors was somewhat reduced, plasmid delivery and encoded gene expression was significantly increased, following systemic administration.

[1201] To demonstrate the impact of the lipoprotein knockout strains in a murine model of triple-negative breast cancer, 6-8 week-old female BALB/c mice (4 mice per group) were inoculated orthotopically in the 4^{th} mammary fat pad with EMT6 cells (5×10⁵ cells in 100 μL PBS). Mice bearing 10-day established flank tumors were IV injected with a single dose of 1×10⁷ CFUs of the YS1646Δasd/ΔFLG/ΔpagP/ΔansB/ΔcsgD/ΔlppAB strain, or the parental YS1646Δasd/ΔFLG/ΔpagP/ΔansB/ΔcsgD strain, each containing a plasmid encoding a luciferase protein (NanoLuciferase® luciferase, or NanoLuc®, Promega) that is secreted (secNanoLuc®), under the control of the CMV promoter. At day 7 post IV dosing, mice were euthanized and tumors were homogenized and plated on LB plates, to enumerate the number of colony forming units (CFUs) per gram of tumor tissue. The parental YS1646Δasd/ΔFLG/ΔpagP/ΔansB/ΔcsgD strain colonized tumors at a mean of 3.3×10⁶ CFUs per gram of tumor tissue, while the lipoprotein-deleted YS1646Δasd/ΔFLG/ΔpagP/ΔansB/ΔcsgD/ΔlppAB strain colonized the tumors with a 2-fold decreased mean of 1.18×10⁶ CFUs/g of tumor tissue.

[1202] In order to measure plasmid delivery to the tumor, and subsequent heterologous gene expression and protein secretion, the activity of the secNanoLuc® was measured. For this, homogenized tumors were assessed for luciferase activity using the NanoGlo® detection reagent (Promega), and read on a SpectraMax® M3 Spectrophotometer/Luminometer (Molecular Devices). While the parental YS1646Δasd/ΔFLG/ΔpagP/ΔansB/ΔcsgD strain induced average luminescence relative light units (RLUs) of 4482.6, the YS1646Δasd/ΔFLG/ΔpagP/ΔansB/ΔcsgD/ΔlppAB strain induced a nearly 10-fold increased average of 33,926.6 RLUs. These data demonstrate the ability of the lipoprotein-deleted strain to improve tumor colonization, and to enhance payload expression.

[1203] These data reveal that, while deletion of lipoprotein somewhat reduces tumor colonization after IV dosing, it significantly enhances plasmid delivery and payload expression in the tumor. These data demonstrate that, contrary to the expectation from the art that deletion of these genes will decrease colonization, lipoprotein deletion enhances plasmid delivery and protein expression in the tumor microenvironment, and in tumors.

### Example 19

### Human and Murine 4-1BBL with a Truncated Cytosolic Domain are Expressed as Well as Wild-Type 4-1BBL

[1204] As discussed herein, variants of the co-stimulatory molecule 4-1BBL that lack the cytoplasmic domain (4-1BBLΔcyt), potentiate the activation of 4-1BBL, without the immunosuppressive reverse signaling that occurs through the molecule's cytoplasmic domain. It is shown in Example 9, that murine 4-1BBLΔcyt can be expressed on the surface of human cells. As shown below, 4-1BBL variants that completely lack the cytoplasmic domain are poorly expressed. To address this, provided are variants of 4-1BBL where the cytoplasmic domain is truncated, such that the immunosuppressive reverse signaling is eliminated.

[1205] Full-length human and mouse 4-1BBL contain positive charges within the cytoplasmic domain, which is at the N-terminus of the protein. This favors the N-terminal to be positioned within the cytoplasm, and allows for proper orientation of the transmembrane domain, and consequently, of the extracellular domain. Full-length human and mouse 4-1BBL are thus expressed at high levels. Upon deletion of the full cytoplasmic domain from human and mouse 4-1BBL, generating the 4-1BBLΔcyt variants, the positive charges at the N-terminal are removed, favoring the N-terminal to be positioned outside the cell. This results in an incorrect orientation of the transmembrane domain (which is now at the N-terminus), and an “inside out” configuration for the 4-1BBLΔcyt variants expressed on the cell surface. The 4-1BBLΔcyt variants are thus expressed at much lower levels than the full-length 4-1BBL proteins.

[1206] To improve 4-1BBL expression, without inducing immunosuppressive reverse signaling, human and mouse 4-1BBL variants were rationally designed with a truncation to the cytoplasmic domain, rather than a complete deletion of the cytoplasmic domain. The human and mouse 4-1BBL variants with the truncated cytoplasmic domains contain the last 4 (RVLP) and last 5 (SRHPK) amino acid residues, respectively, of the cytoplasmic domain, which are adjacent to the transmembrane domain. This re-introduces positively charged residues back into the N-terminal, favoring its position to be inside the cell, and correcting the orientation of the transmembrane domain and the “inside out” configuration. This results in increased expression of the 4-1BBL variants with the truncated cytoplasmic domains, compared to the expression of the 4-1BBLΔcyt variants, while still suppressing the immunosuppressive reverse signaling that occurs through the protein's cytoplasmic domain.

[1207] Additionally, variants of human and mouse 4-1BBL with truncated cytoplasmic domains, and with a Myc Tag added to the N-terminus, were generated, with the hypothesis that the addition of a Myc Tag would add extra positive residues to the N-terminal truncated cytoplasmic domain, correcting the inside out configuration and increasing protein expression.

[1208] The sequences of the full-length human and mouse 4-1BBL proteins, as well as the variants with the partially truncated cytoplasmic domains (CytTrunc), and the deleted cytoplasmic domains (Δcyt), are shown in the table below. The cytoplasmic domain is indicated in bold and is underlined; the transmembrane region is indicated in bold; the extracellular region is underlined; and the MycTag is double underlined.

Sequences of Full-length Human and Mouse 4-1BBL, and of
Variants with Truncated or Deleted Cytoplasmic Domains

| | | SEQ ID |
|---|---|---|
| Variant | Protein Sequence | NO. |
| Human 4- | MEYASDASLDPEAPWPPAPRARACRVLPWALVAGLLLLLL | 389 |
| 1BBL, Full- | LAAACAVFLACPWAVSGARASPGSAASPRLREGPELSPDDPAG | |
| length | LLDLRQGMFAQLVAQNVLLIDGPLSWYSDPGLAGVSLTGGLSY | |
| | KEDTKELVVAKAGVYYVFFQLELRRVVAGEGSGSVSLALHLQ | |
| | PLRSAAGAAALALTVDLPPASSEARNSAFGFQGRLLHLSAGQR | |
| | LGVHLHTEARARHAWQLTQGATVLGLFRVTPEIPAGLPSPRSE | |
| Human | MWALVAGLLLLLLLAAACAVFLACPWAVSGARASPGSAASP | 390 |
| 4-1BBLΔcyt | RLREGPELSPDDPAGLLDLRQGMFAQLVAQNVLLIDGPLSWYS | |
| | DPGLAGVSLTGGLSYKEDTKELVVAKAGVYYVFFQLELRRVV | |
| | AGEGSGSVSLALHLQPLRSAAGAAALALTVDLPPASSEARNSA | |
| | FGFQGRLLHLSAGQRLGVHLHTEARARHAWQLTQGATVLGLF | |
| | RVTPEIPAGLPSPRSE | |
| Human | MRVLPWALVAGLLLLLLLAAACAVFLACPWAVSGARASPGS | 391 |
| 4-1BBL | AASPRLREGPELSPDDPAGLLDLRQGMFAQLVAQNVLLIDGPL | |
| CytTrunc | SWYSDPGLAGVSLTGGLSYKEDTKELVVAKAGVYYVFFQLEL | |
| | RRVVAGEGSGSVSLALHLQPLRSAAGAAALALTVDLPPASSEA | |
| | RNSAFGFQGRLLHLSAGQRLGVHLHTEARARHAWQLTQGATV | |
| | LGLFRVTPEIPAGLPSPRSE | |
| Myc Human | MEQKLISEEDLRVLPWALVAGLLLLLLLAAACAVFLACPWA | 392 |
| 4-1BBL | VSGARASPGSAASPRLREGPELSPDDPAGLLDLRQGMFAQLVA | |
| CytTrunc + | QNVLLIDGPLSWYSDPGLAGVSLTGGLSYKEDTKELVVAKAG | |
| mycTag | VYYVFFQLELRRVVAGEGSGSVSLALHLQPLRSAAGAAALALT | |
| | VDLPPASSEARNSAFGFQGRLLHLSAGQRLGVHLHTEARARHA | |
| | WQLTQGATVLGLFRVTPEIPAGLPSPRSE | |
| Mouse | MDQHTLDVEDTADARHPAGTSCPSDAALLRDTGLLADAAL | 393 |
| 4-1BBL, | LSDTVRPTNAALPTDAAYPAVNVRDREAAWPPALNFCSRHPK | |
| Full-length | LYGLVALVLLLLIAACVPIFTRTEPRPALTITTSPNLGTRENN | |
| | ADQVTPVSHIGCPNTTQQGSPVFAKLLAKNQASLCNTTLNWHS | |
| | QDGAGSSYLSQGLRYEEDKKELVVDSPGLYYVFLELKLSPTFT | |
| | NTGHKVQGWVSLVLQAKPQVDDFDNLALTVELFPCSMENKLV | |
| | DRSWSQLLLLKAGHRLSVGLRAYLHGAQDAYRDWELSYPNTT | |
| | SFGLFLVKPDNPWE | |
| Mouse | MLYGLVALVLLLLIAACVPIFTRTEPRPALTITTSPNLGTRENN | 394 |
| 4-1BBLΔcyt | ADQVTPVSHIGCPNTTQQGSPVFAKLLAKNQASLCNTTLNWHS | |
| | QDGAGSSYLSQGLRYEEDKKELVVDSPGLYYVFLELKLSPTFT | |
| | NTGHKVQGWVSLVLQAKPQVDDFDNLALTVELFPCSMENKLV | |
| | DRSWSQLLLLKAGHRLSVGLRAYLHGAQDAYRDWELSYPNTT | |
| | SFGLFLVKPDNPWE | |
| Mouse | MSRHPKLYGLVALVLLLLIAACVPIFTRTEPRPALTITTSPNLG | 395 |
| 4-1BBAL | TRENNADQVTPVSHIGCPNTTQQGSPVFAKLLAKNQASLCNTT | |
| CytTrunc | LNWHSQDGAGSSYLSQGLRYEEDKKELVVDSPGLYYVFLELK | |
| | LSPTFTNTGHKVQGWVSLVLQAKPQVDDFDNLALTVELFPCS | |
| | MENKLVDRSWSQLLLLKAGHRLSVGLRAYLHGAQDAYRDWE | |
| | LSYPNTTSFGLFLVKPDNPWE | |
| Myc Mouse | MEQKLISEEDLSRHPKLYGLVALVLLLLIAACVPIFTRTEPRP | 396 |
| 4-1BBL | ALTITTSPNLGTRENNADQVTPVSHIGCPNTTQQGSPVFAKLLA | |
| CytTrunc + | KNQASLCNTTLNWHSQDGAGSSYLSQGLRYEEDKKELVVDSP | |
| Myc Tag | GLYYVFLELKLSPTFTNTGHKVQGWVSLVLQAKPQVDDFDNL | |
| | ALTVELFPCSMENKLVDRSWSQLLLLKAGHRLSVGLRAYLHG | |
| | AQDAYRDWELSYPNTTSFGLFLVKPDNPWE | |

[1209] To compare the expression levels of the engineered 4-1BBL variants with those of the full-length 4-1BBL proteins, HEK293T cells were transfected with 500 ng of DNA encoding the full-length protein or variant, using the FuGENE® transfection reagent (Promega), at the proper reagent:DNA ratios, with untransfected cells as negative controls. Forty-eight hours post-transfection, transfected HEK293T cells were harvested, and stained with either an anti-mouse 4-1BBL or anti-human 4-1BBL antibody, as appropriate. Staining for mouse 4-1BBL was performed using a biotinylated antibody against mouse 4-1BBL (clone TKS-1; BioLegend), followed by a streptavidin-allophycocyanin (APC) conjugate (BioLegend). Staining for human 4-1BBL was performed using an APC-conjugated antibody against human 4-1BBL (clone 5F4; BioLegend). The untransfected cells also were stained, to measure background fluorescence. The expression of membrane-bound 4-1BBL was measured by flow cytometry, and the results are provided in terms of the background-subtracted mean fluorescence intensity (dMFI) (i.e., by subtracting the MFI of a negative control (stained untransfected cells), from the MFI of the sample).

[1210] As shown in the tables below, for both human and mouse 4-1BBL, expression of the variants with the truncated cytoplasmic domain was significantly higher than expression of the variants with a complete deletion of the cytoplasmic domain. Despite lacking the full-length cytoplasmic domain, the human 4-1BBL variant with the truncated cytoplasmic domain was expressed at 93% of the level of expression of full-length human 4-1BBL, whereas the human 4-1BBL variant with the full cytoplasmic domain deletion was expressed at 42% of the level of expression of full-length human 4-1BBL. For the orthologous mouse 4-1BBL, the variant with the truncated cytoplasmic domain was expressed at 63% of the level of expression of full-length mouse 4-1BBL, whereas the variant with the full cytoplasmic domain deletion was expressed at 13% of the level of expression of full-length mouse 4-1BBL.

[1211] For each of the truncated mouse and human 4-1BBL variants, a construct with a Myc tag was tested, to determine if adding additional positive amino acid residues to the truncated cytoplasmic portion of 4-1BBL would increase expression levels. As shown in the tables below, however, addition of the Myc tag to the variants with the truncated cytoplasmic domain decreased expression when compared to the variants with the truncated cytoplasmic domain and no Myc tag. It is undetermined why the Myc tag reduces expression, however, addition of the Myc tag could potentially result in a non-optimal sequence for 4-1BBL expression.

Expression Levels of Human 4-1BBL Variants with
Truncated or Deleted Cytoplasmic Domains

| | Membrane-Bound | |
|---|---|---|
| | 4-1BBL Expression | |
| | in HEK293T Cells | % of Full-Length |
| Human 4-1BBL Variants | (dMFI) | 4-1BBL Expression |
| Human 4-1BBL, Full-length | 1.04E+04 | 100.00 |
| Human 4-1BBL, Cytoplasmic | 4.39E+03 | 42.21 |
| domain deleted | | |
| Human 4-1BBL, Cytoplasmic | 9.71E+03 | 93.37 |
| domain truncated | | |
| Human 4-1BBL, Cytoplasmic | 1.77E+03 | 17.02 |
| domain truncated + Myc tag | | |

Expression Levels of Murine 4-1BBL Variants
with Truncated or Deleted Cytoplasmic Domains

| | Membrane-Bound | |
|---|---|---|
| | 4-1BBL Expression | |
| | in HEK293T Cells | % of Full-Length |
| Murine 4-1BBL Variants | (dMFI) | 4-1BBL Expression |
| Murine 4-1BBL, Full-length | 4.06E+05 | 100.00 |
| Murine 4-1BBL, Cytoplasmic | 5.43E+04 | 13.37 |
| domain deleted | | |
| Murine 4-1BBL, Cytoplasmic | 2.56E+05 | 63.05 |
| domain truncated | | |
| Murine 4-1BBL, Cytoplasmic | 7.54E+04 | 18.57 |
| domain truncated + Myc tag | | |

### Example 20

### Anti-CTLA-4 scFv-Fc Demonstrates Superior Blockade of the CD80/CTLA-4 and CD86/CTLA-4 Interactions Compared to Anti-CTLA-4 scFv

[1212] An scFv-Fc specific for human CTLA-4 (see, SEQ ID NOs:401 and 402 for nucleic acid and protein sequences, respectively) was designed using the amino acid sequence of ipilimumab. Ipilimumab is a fully human IgG1K monoclonal antibody that specifically binds human CTLA-4 (see, e.g., the antibody designated 10D1 in U.S. Patent Publication No. 2002/0086014 and in U.S. Pat. No. 6,984,720), blocking CTLA-4's immune inhibiting interaction with CD80 (also known as B7.1 or B7-1) and CD86 (also known as B7.2 or B7-2).

[1213] To generate the ipilimumab scFv antibody fragment (see, SEQ ID NO:403), the variable light chain (VL) and variable heavy chain (V_{H}) of ipilimumab were linked with a 20 amino acid long glycine-serine (GS) linker ((GGGGS)₄). To generate the scFv-Fc antibody fragment (see, SEQ ID NO:402), the variable heavy chain of the ipilimumab scFv was linked to a human IgG1 Fc, containing a mutation of the free cysteine in the hinge region to a serine (at position 272 in SEQ ID NO:402). The leader sequence (METPAQLLFLLLLWLPDTTG; corresponding to residues 1-20 in SEQ ID NO:402) was derived from the sequence of the human immunoglobulin kappa variable 3-20 (IGKV3-20) protein. The sequence was codon optimized using the GenScrip GenSmart™ Codon Optimization tool.

[1214] The neutralizing ability of the anti-CTLA-4 scFv-Fc was compared to that of the anti-CTLA-4 scFv (lacking the human IgG1 Fc portion) using competitive ELISAs to measure the ability of each of the antibody fragments to block the interactions between CTLA-4 and its ligands, CD80 and CD86. HEK293T cells were transfected with 3 micrograms of DNA encoding the anti-CTLA-4 scFv-Fc or the anti-CTLA-4 scFv antibody fragment constructs, using the FuGENE® transfection reagent (Promega), at the proper reagent:DNA ratios. Forty-eight hours post-transfection, HEK293T cell-free culture supernatants were harvested, filtered, and used in a competitive ELISA to assess the blockade activity of the anti-CTLA-4 antibody fragments.

[1215] For the competitive ELISAs, mouse CD80 or CD86 recombinant proteins (R&D Systems) were coated overnight at 4° C. on a high protein-binding 96-well plate, at a concentration of 100 ng/ml. The wells were then washed one time with PBS 0.05% Tween-20, and the wells were blocked with ELISA blocking buffer for 1 hour at room temperature. The wells were then washed one time with PBS 0.05% Tween-20. HEK293T cell culture supernatants, containing each of the anti-CTLA-4 antibody fragments, were mixed with 10 ng/ml of a recombinant murine CTLA-4-human IgG1 Fc chimera (R&D Systems), and added to the wells and incubated for 2 hours at room temperature. The wells were then washed three times with PBS 0.05% Tween-20, and horseradish peroxidase (HRP)-conjugated anti-human IgG1 antibody was added to the wells (Jackson ImmunoResearch), and incubated for one hour at room temperature. The wells were then washed three times with PBS 0.05% Tween-20, and detection reagent (3,3′,5,5′-tetramethylbenzidine (TMB), Thermo Fisher Scientific) was added to the wells. The enzymatic reaction was stopped with sulfuric acid (BioLegend), and the optical densities were read at 450 nm.

[1216] The results of the competitive ELISAs are summarized in the table below. The anti-CTLA-4 scFv-Fc blocked the binding of CTLA-4 to CD86 by 75.5%, and blocked the binding of CTLA-4 to CD80 by 40.6%, whereas the anti-CTLA-4 scFv blocked the binding of CTLA-4 to CD86 by 32.5%, and blocked the binding of CTLA-4 to CD80 by 7%. A higher degree of CD86/CTLA-4 blocking activity (compared with CD80/CTLA-4 blocking activity) was observed with both antibody fragments, and a superior neutralizing activity was observed with the anti-CTLA-4 scFv-Fc, when compared to the anti-CTLA-4 scFv.

Competitive ELISA Results

| Anti-CTLA-4 Antibody | % CD86 | % CD80 |
|---|---|---|
| Fragment | Blockade Activity | Blockade Activity |
| Anti-CTLA-4 scFv | 32.5 | 7.0 |
| Anti-CTLA-4 scFv-Fc | 75.5 | 40.6 |

[1217] An anti-murine CTLA-4 scFv (SEQ ID NO:404) and anti-murine CTLA-4 scFv-Fc (SEQ ID NO:405), derived from the 9D9 clone, also were prepared, as discussed above for the corresponding human anti-CTLA-4 antibody fragments. The scFv contains an IgK leader mouse sequence, and the V_{L} and V_{H} domains from clone 9D9, linked via a (Gly₄Ser)₃ linker. The scFv-Fc also contains a mouse IgG2a Fc linked to the V_{H} domain.

[1218] Included among the immunostimulatory bacteria provided herein, are those that encode, on the plasmid, anti-CTLA-4 antibodies and fragments thereof, including the anti-CTLA-4 scFv antibody fragments and the anti-CTLA-4 scFv-Fc antibody fragments, as provided herein, as well as combinations with nucleic acid molecules encoding other therapeutic products.

### Example 21

### Strain YS1646Δasd/ΔFLG/ΔpagP/ΔansB/ΔcsgD is Restricted to the Phagocytic Myeloid Immune Cell Compartment In Vivo

[1219] Strain YS1646Δasd/ΔFLG is deficient for non-phagocytic cell uptake, as demonstrated above (see, Example 4). To confirm that strain YS1646Δasd/ΔFLG/ΔpagP/ΔansB/ΔcsgD also is deficient for non-phagocytic cell uptake, a strain of YS1646Δasd/ΔFLG/ΔpagP/ΔansB/ΔcsgD, constitutively expressing mCherry (a red fluorescent protein) under the bacterial rpsM promoter, was IV administered to EMT6 orthotopic tumor-bearing mice.

[1220] For this experiment, 6-8 week-old female Balb/c mice (4 mice per group) received orthotopic implantation of EMT6 cells (2×10⁵ cells in 100 μL PBS). Mice bearing large established flank tumors were IV injected on day 10 with 3×10⁶ CFUs of the YS1646Δasd/ΔFLG/ΔpagP/ΔansB/ΔcsgD-mCherry strain. Tumors were resected 8 days post IV dosing, and cut into 2-3 mm pieces into gentleMACS™ C tubes (Miltenyi Biotec) filled with 2.5 mL enzyme mix (RPMI-1640 containing 10% FBS with 1 mg/mL Collagenase IV, and 20 μg/mL DNase I). The tumor pieces were dissociated using OctoMACS™ (Miltenyi Biotec) specific dissociation program (mouse implanted tumors), and the whole cell preparation was incubated with agitation for 45 minutes at 37° C. After the 45 minute incubation, a second round of dissociation was performed using the OctoMACS™ (mouse implanted tumor) program, and the resulting single cell suspensions were filtered through a 70 μM nylon mesh into a 50 mL tube. The nylon mesh was washed once with 5 mL of RPMI-1640 containing 10% FBS, and the cells were filtered a second time using a new 70 μM nylon mesh, into a new 50 mL tube. The nylon mesh was washed with 5 mL of RPMI-1640 containing 10% FBS, and the filtered cells were then centrifuged at 1000 RPM for 7 minutes. The resulting dissociated cells were resuspended in PBS and kept on ice before the staining process.

[1221] For the flow-cytometry staining, 100 μL of the single cell suspensions were seeded in wells of a V-bottom 96-well plate. PBS containing a dead/live stain (Zombie Aqua™, BioLegend) and Fc Blocking reagents (BD Biosciences) were added at 100 μL per well, and the plate was incubated on ice for 30 minutes in the dark. After 30 minutes, cells were washed twice with PBS+2% FBS by centrifugation at 1300 RPM for 3 minutes. Cells were then resuspended in PBS+2% FBS containing fluorochrome-conjugated antibodies (CD4 FITC clone RM4-5; CD8a BV421 clone 53-6.7; F4/80 APC clone BM8; CD11b PE-Cy7 clone M1/70; CD45 BV570 clone 30-F11; CD3 PE clone 145-2C11; Ly6C BV785 clone HK1.4; I-A/I-E APC-Cy7 clone M5/114.15.2; Ly6G BV605 clone 1A8; and CD24 PercP-Cy5.5 clone M1/69; all from BioLegend), and incubated on ice for 30 minutes in the dark. After 30 minutes, cells were washed twice with PBS+2% FBS by centrifugation at 1300 RPM for 3 minutes, and resuspended in flow cytometry fixation buffer (Thermo Fisher Scientific). Flow cytometry data were acquired using the NovoCyte® Flow Cytometer (ACEA Biosciences, Inc.), and analyzed using the FlowJo™ software (Tree Star, Inc.).

[1222] The results (see tables below) demonstrated that, in tumors from mice IV injected with the YS1646Δasd/ΔFLG/ΔpagP/ΔansB/ΔcsgD-mCherry strain, 1.95% of tumor-infiltrating monocytes and 3.36% of tumor-associated neutrophils (TANs) in the tumor microenvironment were positive for mCherry expression, whereas tumors from mice IV injected with PBS showed background staining/fluorescence of 0.64% for tumor-infiltrating monocytes, and 0.01% for TANs. 2.92% of the tumor-associated macrophage (TAM) population, and 4.34% of the tumor-infiltrating dendritic cells (DCs) had taken up the YS1646Δasd/ΔFLG/ΔpagP/ΔansB/ΔcsgD-mCherry strain, while background fluorescence in tumors from mice injected with PBS was 0.70% and 0.50% for TAMs and DCs, respectively. 2.39% of M1 TAMs, and 0.53% of M2 TAMs stained positive for YS1646Δasd/ΔFLG/ΔpagP/ΔansB/ΔcsgD-mCherry, while tumors from PBS-injected mice had background signals of 0.20% in M1 TAMs and 0.50% in M2 TAMs. In contrast, within the CD45⁻ population, corresponding to stromal and tumor cells (i.e., cells that are not tumor-resident immune/myeloid cells), only 0.081% showed positivity for mCherry expression (compared to 0.002% background staining, from PBS-injected mice).

% mCherry Expression in Tumors from Mice
IV Injected with the YS1646Δasd/ΔFLG/ΔpagP/ΔansB/ΔcsgD-
mCherry Strain

| | % mCherry Expression by Cell Type | | | | | | |
|---|---|---|---|---|---|---|---|
| | CD45⁻ | | M1 | M2 | | | |
| Experiment # | Cells | DCs | TAMs | TAMs | TAMs | Monocytes | TANs |
| 1 | 0.00248 | 0.00000 | 0.28000 | 0.29000 | 0.57000 | 0.33000 | 0.00000 |
| 2 | 0.20000 | 10.50000 | 5.84000 | 1.06000 | 6.90000 | 4.37000 | 7.61000 |
| 3 | 0.09100 | 6.02000 | 3.25000 | 0.52000 | 3.77000 | 2.23000 | 5.55000 |
| 4 | 0.02900 | 0.82000 | 0.20000 | 0.25000 | 0.45000 | 0.88000 | 0.29000 |
| Average | 0.08062 | 4.33500 | 2.39250 | 0.53000 | 2.92250 | 1.95250 | 3.36250 |
| SD | 0.08781 | 4.89877 | 2.70125 | 0.37283 | 3.07408 | 1.79852 | 3.81108 |

SD = standard deviation;
DCs = dendritic cells;
TAMs = tumor-associated macrophages;
TANs = tumor-associated neutrophils

% mCherry Expression in Tumors from Mice IV Injected with PBS

| | % mCherry Expression by Cell Type | | | | | | |
|---|---|---|---|---|---|---|---|
| | CD45⁻ | | M1 | M2 | | | |
| Experiment # | Cells | DCs | TAMS | TAMs | TAMs | Monocytes | TANs |
| 1 | 0.00307 | 0.19000 | 0.15000 | 0.43000 | 0.58000 | 0.28000 | 0.01300 |
| 2 | 0.00129 | 0.58000 | 0.10000 | 0.64000 | 0.74000 | 1.38000 | 0.01100 |
| 3 | 0.00283 | 0.97000 | 0.36000 | 0.60000 | 0.96000 | 0.69000 | 0.00350 |
| 4 | 0.00169 | 0.25000 | 0.19000 | 0.34000 | 0.53000 | 0.21000 | 0.00599 |
| Average | 0.00222 | 0.49750 | 0.20000 | 0.50250 | 0.70250 | 0.64000 | 0.00837 |
| ±SD | 0.00086 | 0.35864 | 0.11284 | 0.14151 | 0.25435 | 0.53684 | 0.00439 |

SD = standard deviation;
DCs = dendritic cells;
TAMs = tumor-associated macrophages;
TANs = tumor-associated neutrophils

[1223] These data indicate that the deletion of pagP, ansB, and csgD from the flagella-eliminated strain, does not significantly impact the specificity of bacterial uptake by the phagocytic immune cell compartment of the tumor microenvironment (i.e., the tumor-resident immune/myeloid cells). As discussed above and elsewhere herein, the flagella and its downstream signaling impact on SPI-1 are required for epithelial cell infectivity, and the lack thereof restricts uptake of the bacteria to only the tumor-resident immune/myeloid cells. Eliminating the flagella confers numerous benefits to the immunostimulatory bacteria, including the S. typhimurium strains. These benefits include eliminating TLR5-induced inflammatory cytokines that suppress adaptive immunity, reducing macrophage pyroptosis, as well as maintaining (or enhancing) tumor-specific enrichment upon systemic administration, where uptake is confined to tumor-resident phagocytic cells.

[1224] It is shown herein that elimination of pagP, ansB, and csgD from the flagella-eliminated strain does not significantly impact the specificity of bacterial uptake by tumor-resident immune cells, and confers additional benefits, including, for example, reducing TLR4-induced pro-inflammatory cytokines, reducing immunogenicity and enhancing tolerability (ΔpagP); restoring T-cell function (ΔansB); and improving the intracellular uptake of the bacteria, which enhances plasmid delivery of encoded immunomodulatory proteins in vivo and improves therapeutic efficacy (ΔcsgD).

### Example 22

### Salmonella purI and msbB Clean Deletion Gene Knockout Strain Engineering and Characterization

[1225] The purI gene in strain YS1646 (VNP20009) was not deleted; it was disrupted by a transposon (Tn10) insertion that resulted in a 16.6 kbp (kilobase pair) genomic inversion event, whereby two insertion sequence (IS) elements were subsequently incorporated into the genome, one within the purI (purM) gene, and the other 16.6 kbp upstream, in the intergenic region directly flanking the 3′-end of the acrD gene. The region between the two IS elements is inverted and contains 18 genes, including yffB, DC51_2568, upp, uraA, yfgE, yfgD, DC51_2573, perM, purC, and others. The insertion sequence element in the intergenic region encodes a fully functional transposase (see, e.g., Broadway et al. (2014) J. Biotechnology 192:177-178). The presence of such a transposase in a therapeutic strain presents a possible genetic stability concern. The presence of the complete genetic sequence of the purI gene, disrupted by means of a chromosomal reengagement, leaves open the possibility of reversion to a wild-type gene. These elements were removed from the strain, for development of the strain as a human therapy.

[1226] The msbB gene in strain YS1646 also was not fully deleted, but was disrupted by a genetically engineered 511 bp deletion (of the 972 bp gene) that resulted in an extension of the pykA gene (encoding pyruvate kinase), replacing the last 5 amino acid codons with 13 new codons (see, e.g., Broadway et al. (2014) J. Biotechnology 192:177-178).

[1227] To eliminate any possible reversion of the purI and msbB genes to their respective wild-type genes, and to determine the effects of the clean deletions of these genes, strain YS1646Δasd/ΔFLG/ΔpagP/ΔansB/ΔcsgD was further modified to delete the remaining purI and msbB gene sequence fragments, as well as two transposon-associated insertion sequence elements, and a pykA gene extension.

[1228] Deletion of purI Gene Fragments and Transposon-Associated Insertion Sequence Elements

[1229] A first region, located between the yffB and purN genes, and containing: 1) a 1,209 bp transposon insertion sequence element, annotated as DC51_2586 in the sequence obtained from Broadway et. al (2014) (see, GenBank Accession numbers CP007804 and CP008745); and 2) 740 bp of the remaining 891 bp purI gene fragment (referred to herein as the large purI gene fragment), was targeted for deletion, using modifications of the method of Datsenko and Wanner (see, Proc. Natl. Acad. Sci. U.S.A. 97:6640-6645 (2000)). A small 151 bp portion of the 891 bp (large) purI gene fragment was left intact to avoid affecting the adjacent, downstream gene, purN (encoding phosphoribosylglycinamide formyltransferase). A plasmid, pSL0165, containing 284 and 262 bps of homology to the left hand and right hand regions, respectively, of the DC51_2586 insertion sequence element and the large purI gene fragment, was transformed into DH5-alpha competent cells (Thermo Fisher Scientific). A kanamycin gene cassette flanked by loxP sites was cloned into this plasmid, and the resulting vector was designated pSL0174. The DC51_2586 insertion sequence element and the large purI gene fragment knockout cassette then was PCR amplified using primers purm-1 and purm-2 (SEQ ID NOs: 410 and 411, respectively; see Table 2), gel purified, and introduced into strain YS1646Δasd/ΔFLG/ΔpagP/ΔansB/ΔcsgD carrying the temperature sensitive lambda red recombination plasmid pKD46 by electroporation. The kanamycin resistance gene then was cured by cre-mediated recombination as described above, and the temperature-sensitive plasmids were cured by growth at non-permissive temperature. The DC51_2586 insertion sequence element and large purI gene fragment knockout sequences were confirmed by PCR using primers purm-3 and purm-4 (SEQ ID NOs: 412 and 413, respectively; see Table 2), and verified by DNA sequencing. The resulting mutant derivative of parental strain YS1646Δasd/ΔFLG/ΔpagP/ΔansB/ΔcsgD was designated YS1646Δasd/ΔFLG/ΔpagP/ΔansB/ΔcsgD/ΔpurI_{(large clean)}.

[1230] A second region, located between the acrD and DC51_2568 genes, and containing: 1) a 1,209 bp transposon insertion sequence element, annotated as DC51_2566 in the sequence obtained from Broadway et. al (2014) (see, GenBank Accession numbers CP007804 and CP008745); and 2) the remaining 231 by purI gene fragment (referred to herein as the small purI gene fragment), was targeted for deletion, using modifications of the method of Datsenko and Wanner (see, Proc. Natl. Acad. Sci. U.S.A. 97:6640-6645 (2000)). A plasmid, pSL0210, containing 241 and 265 bps of homology to the left hand and right hand regions, respectively, of the DC51_2566 insertion sequence element and the small purI gene fragment, was transformed into DH5-alpha competent cells (Thermo Fisher Scientific). A kanamycin gene cassette flanked by loxP sites was cloned into this plasmid, and the resulting vector was designated pSL0212. The DC51_2566 insertion sequence element and the small purI gene fragment knockout cassette then was PCR amplified using primers acrd-1 and purm-5 (SEQ ID NOs: 416 and 414, respectively; see Table 2), gel purified, and introduced into strain YS1646Δasd/ΔFLG/ΔpagP/ΔansB/ΔcsgD/ΔpurI_{(large clean)} carrying the temperature sensitive lambda red recombination plasmid pKD46, by electroporation. The kanamycin resistance gene then was cured by Cre-mediated recombination, as described above, and the temperature-sensitive plasmids were cured by growth at non-permissive temperature. The DC51_2566 insertion sequence element and small purI gene fragment knockout sequences were confirmed by PCR using primers purm-6 and acrd-3 (SEQ ID NOs: 415 and 417, respectively; see Table 2), and verified by DNA sequencing. The resulting mutant derivative of parental strain YS1646Δasd/ΔFLG/ΔpagP/ΔansB/ΔcsgD/ΔpurI_{(large clean)} was designated as YS1646Δasd/ΔFLG/ΔpagP/ΔansB/ΔcsgD/ΔpurI_{(full clean)}, or alternatively, YS1646Δasd/ΔFLG/ΔpagP/ΔansB/ΔcsgD/F-ΔpurI.

[1231] Strain YS1646Δasd/ΔFLG/ΔpagP/ΔansB/ΔcsgD/F-ΔpurI Displays Enhanced Injection Stock Cell Viability

[1232] To evaluate the effects of the deletions of the remaining purI gene sequence fragments and the transposon-associated insertion sequence elements on the in vitro fitness of the bacteria, the cell viability of strains of YS1646Δasd/ΔFLG/ΔpagP/ΔansB/ΔcsgD, with and without the full purI gene deletion (F-ΔpurI), and carrying the same plasmids, was compared.

[1233] The cell viability of strains of YS1646Δasd/ΔFLG/ΔpagP/ΔansB/ΔcsgD/F-ΔpurI, containing either plasmid ADN-657 (pATI1.76 CMV muIL-15Rα-IL-15sc_T2A_huSTING N154S/R284G tazCTT HPRE bGHpA), or plasmid ADN-750 (pATI2.1 CMV VCIP huIL-15Rα-IL-15sc_T2A_huSTING N154S/R284G tazCTT HPRE bGHpA), and the cell viability of strains of YS1646Δasd/ΔFLG/ΔpagP/ΔansB/ΔcsgD, expressing the same plasmids (ADN-657 and ADN-750), was evaluated by directly comparing viable CFUs after culture processing for frozen injection stocks. Plasmid ADN-657 encodes murine IL-15Rα-IL-15sc and a modified human STING chimera, with a replacement of the CTT of human STING with the CTT of Tasmanian devil STING, and the GOF mutations N154S/R284G (huSTING N154S/R284G tazCTT). The two payloads are expressed under the control of a CMV promoter, from a bicistronic construct comprising a T2A peptide. The construct also includes a Hepatitis B virus Posttranscriptional Regulatory Element (HPRE), and a bovine growth hormone polyadenylation signal sequence (bGHpA). Plasmid ADN-750 encodes human IL-15Rα-IL-15sc and the same modified human STING chimera, where expression of the two payloads is under control of a CMV promoter, and the single promoter system is achieved using an endogenous human IRES (Internal Ribosome Entry Site), known as Vascular Endothelial Growth Factor and Type 1 Collagen Inducible Protein (VCIP; SEQ ID NO:432), placed upstream of the nucleic acid encoding both payloads, as well as a T2A peptide sequence, placed between the two ORFs.

[1234] For this experiment, 100 μl of overnight stationary phase cultures, of equivalent OD_{600 nm} optical density (OD) values, were used to inoculate 25 ml of 4×YT media in 250 ml baffled shaker flasks with vented caps, and the cultures were incubated at 37° C. with shaking (at 225 RPM) for approximately 6 hours. Cultures were harvested at stationary phase at equivalent OD_{600 nm} values, washed twice, adjusted to OD_{600 nm}=2, aliquoted, and frozen at −80° C. The following day, two aliquots of each strain were thawed, the OD_{600 nm} values were measured, and the strains were plated on agar plates to determine the titer and viability. % viability was determined from the ratio of OD_{600 nm} to CFU/ml.

[1235] Strain YS1646Δasd/ΔFLG/ΔpagP/ΔansB/ΔcsgD/F-ΔpurI-(ADN-657) injection stock was determined to be 77% viable, while strain YS1646Δasd/ΔFLG/ΔpagP/ΔansB/ΔcsgD-(ADN-657) injection stock was determined to be 62% viable. Strain YS1646Δasd/ΔFLG/ΔpagP/ΔansB/ΔcsgD/F-ΔpurI-(ADN-750) injection stock was determined to be 72% viable, while strain YS1646Δasd/ΔFLG/ΔpagP/ΔansB/ΔcsgD-(ADN-750) injection stock was determined to be 63% viable.

[1236] These data demonstrate a similar or enhanced fitness profile for strain YS1646Δasd/ΔFLG/ΔpagP/ΔansB/ΔcsgD/F-ΔpurI compared to the parental strain, YS1646Δasd/ΔFLG/ΔpagP/ΔansB/ΔcsgD. Strain YS1646Δasd/ΔFLG/ΔpagP/ΔansB/ΔcsgD/F-ΔpurI displayed improved viability following frozen injection stock preparation, indicating that the genomic deletions not only diminish a potential genetic instability issue, but also provide a metabolic benefit that is manifested as increased cell viability.

[1237] Strain YS1646Δasd/ΔFLG/ΔpagP/ΔansB/ΔcsgD/F-ΔpurI Displays Similar Growth Characteristics in Broth Media Compared to the YS1646Δasd/ΔFLG/ΔpagP/ΔansB/ΔcsgD Parental Strain

[1238] To evaluate the effects of the deletions of the remaining purI gene sequence fragments and the transposon-associated insertion sequence elements on the in vitro fitness of the bacterial strains, broth medium growth was compared between strains of YS1646Δasd/ΔFLG/ΔpagP/ΔansB/ΔcsgD/F-ΔpurI, expressing either plasmid ADN-657 (pATI1.76 CMV muIL-15Rα-IL-15sc_T2A_huSTING N154S/R284G tazCTT HPRE bGHpA), or plasmid ADN-750 (pATI2.1 CMV VCIP huIL-15Rα-IL-15sc_T2A_huSTING N154S/R284G tazCTT HPRE bGHpA), and strains of YS1646Δasd/ΔFLG/ΔpagP/ΔansB/ΔcsgD, expressing the same plasmids (ADN-657 and ADN-750). Frozen injection stocks were thawed at room temperature, and normalized to 1×10⁷ CFU/mL by diluting in PBS. 10 μL of the normalized samples were used to inoculate 300 μL of LB media (1×10⁵ CFU/well) in a clear, flat-bottomed 96-well plate in technical quadruplicate. The plate was incubated with shaking at 37° C., and the OD_{600 nm} values were monitored in 15 minute intervals over the course of 16 hours. OD_{600 nm} values were plotted to construct growth curves, and the slope of the log phase of growth was calculated and used to determine the doubling time for each strain.

[1239] Each of strains YS1646Δasd/ΔFLG/ΔpagP/ΔansB/ΔcsgD/F-ΔpurI-(ADN-657), YS1646Δasd/ΔFLG/ΔpagP/ΔansB/ΔcsgD-(ADN-657), YS1646Δasd/ΔFLG/ΔpagP/ΔansB/ΔcsgD/F-ΔpurI-(ADN-750) and YS1646Δasd/ΔFLG/ΔpagP/ΔansB/ΔcsgD-(ADN-750) generated comparable growth profiles, and reached similar cell densities at stationary phase. Strain YS1646Δasd/ΔFLG/ΔpagP/ΔansB/ΔcsgD/F-ΔpurI-(ADN-657) had a doubling time of 77 minutes, strain YS1646Δasd/ΔFLG/ΔpagP/ΔansB/ΔcsgD-(ADN-657) had a doubling time of 62 minutes, strain YS1646Δasd/ΔFLG/ΔpagP/ΔansB/ΔcsgD/F-ΔpurI-(ADN-750) had a doubling time of 72 minutes, and strain YS1646Δasd/ΔFLG/ΔpagP/ΔansB/ΔcsgD-(ADN-750) had a doubling time of 63 minutes. These data demonstrate a similar fitness profile for strain YS1646Δasd/ΔFLG/ΔpagP/ΔansB/ΔcsgD/F-ΔpurI compared to the parental strain, YS1646Δasd/ΔFLG/ΔpagP/ΔansB/ΔcsgD. Strain YS1646Δasd/ΔFLG/ΔpagP/ΔansB/ΔcsgD/F-ΔpurI displayed slightly increased doubling time in broth medium, but generated similar growth curve profiles and stationary phase cell densities, compared to the parental strain.

[1240] Deletion of msbB Gene Fragment and pykA Extension

[1241] The msbB gene in strain YS1646 was disrupted by a genetically engineered 511 bp deletion (of the 972 bp gene) that resulted in an extension of the pykA gene, replacing the last 5 amino acid codons with 13 new codons (see, e.g., Broadway et al. (2014) J. Biotechnology 192:177-178). The region containing the remaining msbB gene fragment and the sequence encoding the last 13 amino acid codons in pykA was targeted for deletion using modifications of the method of Datsenko and Wanner (see, Proc. Natl. Acad. Sci. U.S.A. 97:6640-6645 (2000)). A plasmid, pSL0209 (see, SEQ ID NO:408), containing 200 and 196 bp of homology to the left hand and right hand regions, respectively, of the remaining msbB gene fragment and the pykA gene extension, was transformed into DH5-alpha competent cells (Thermo Fisher Scientific). A kanamycin gene cassette flanked by loxP sites was cloned into this plasmid, and the resulting vector was designated pSL0211 (see, SEQ ID NO:409). The msbB gene fragment and pykA gene extension knockout cassette then was PCR amplified using primers msbB-1 and msbB-2 (SEQ ID NOs: 418 and 419, respectively; see, Table 2), gel purified, and introduced into strain YS1646Δasd/ΔFLG/ΔpagP/ΔansB/ΔcsgD/ΔpurI_{(full clean)}, carrying the temperature sensitive lambda red recombination plasmid pKD46, by electroporation. The kanamycin resistance gene then was cured by Cre-mediated recombination, as described above, and the temperature-sensitive plasmids were cured by growth at non-permissive temperature. The msbB gene fragment and pykA gene extension knockout sequences were confirmed by PCR using primers msbB-3 and msbB-4 (SEQ ID NOs: 420 and 421, respectively; see, Table 2), and verified by DNA sequencing. The resulting mutant derivative of parental strain YS1646Δasd/ΔFLG/ΔpagP/ΔansB ΔcsgD/ΔpurI_{(full clean)} was designated as YS1646Δasd/ΔFLG/ΔpagP/ΔansB/ΔcsgD/ΔpurI_{(full clean)}/ΔmsbB_{(full clean)}.

TABLE 2
Primer Sequence Information

| | | | SEQ |
|---|---|---|---|
| | | | ID |
| Primer | Primer Sequence | Primer Description | NO. |
| purm-1 | ccagatgtggcttgt | Fwd primer for amplifying the | 410 |
| | ttatacttcgc | DC51_2586 insertion sequence element | |
| | | and the large purI (740 bp) fragment | |
| | | gene KO cassette | |
| purm-2 | ccttattgctgaata | Rev primer for amplifying the | 411 |
| | ctgccctgag | DC51_2586 insertion sequence element | |
| | | and the large purI (740 bp) gene | |
| | | fragment KO cassette | |
| purm-3 | cgtgtcgcaattctt | Fwd primer for checking DC51_2586 | 412 |
| | aatgccatag | insertion sequence element and the | |
| | | large purI (740 bp) gene fragment KO | |
| purm-4 | caaacatcggactca | Rev primer for checking DC51_2586 | 413 |
| | gaatacgc | insertion sequence element and the | |
| | | large purI (740 bp) gene fragment KO | |
| purm-5 | caggcgataaaggct | Rev primer for amplifying the | 414 |
| | aacaaccg | DC51_2566 insertion sequence element | |
| | | and the small purI (231 bp) gene | |
| | | fragment KO cassette | |
| purm-6 | ttgacctggatcaac | Rev primer for checking the | 415 |
| | caaaagcg | DC51_2566 insertion sequence element | |
| | | and the small purI (231 bp) gene | |
| | | fragment KO | |
| acrd-1 | cctgcgaccgatact | Fwd primer for amplifying the | 416 |
| | gatgac | DC51_2566 insertion sequence element | |
| | | and the small purI (231 bp) gene | |
| | | fragment KO cassette | |
| acrd-3 | gctactcgctacctg | Fwd primer for checking the | 417 |
| | gatgc | DC51_2566 insertion sequence element | |
| | | and the small purI (231 bp) gene KO | |
| msbB-1 | ggtcagatcgtcgtg | Fwd primer for amplifying the msbB | 418 |
| | aatacctg | gene fragment and pykA gene extension | |
| | | KO cassette | |
| msbB-2 | atgaacgcacgctga | Rev primer for amplifying the msbB | 419 |
| | acctg | gene fragment and pykA gene extension | |
| | | KO cassette | |
| msbB-3 | acaccacacgttaca | Fwd primer for checking the msbB gene | 420 |
| | tgcacttg | fragment and pykA gene extension KO | |
| msbB-4 | aagccattgccatgt | Rev primer for checking the msbB gene | 421 |
| | ctgcg | fragment and pykA gene extension KO | |

Fwd = forward;
Rev = reverse;
KO = knockout

Plasmid Information

| | | Vector | Homology Arm | |
|---|---|---|---|---|
| | | Name after | Length | |
| | Synthetic | Kanamycin | Left | Right |
| Gene Sequence | DNA Vector | Cloning | Hand | Hand |
| purI large (740 bp) | pSL0165 | pSL0174 | 284 bp | 262 bp |
| fragment | | | | |
| purI small (231 bp) | pSL0210 | pSL0212 | 241 bp | 265 bp |
| fragment | | | | |
| msbB fragment | pSL0209 | pSL0211 | 200 bp | 196 bp |

[1242] The YS1646Δasd/ΔFLG/ΔpagP/ΔansB/ΔcsgD/ΔpurI_{(full clean)}/ΔmsbB_{(full clean)} Strain Displays Enhanced Growth in Broth Media

[1243] To evaluate the effects of the deletions of the remaining purI and msbB gene fragments, the transposon-associated insertion sequence elements, and the pykA gene extension, from the bacterial genome, on the in vitro fitness of the immunostimulatory bacteria, the broth growth profiles of strains YS1646Δasd/ΔFLG/ΔpagP/ΔansB/ΔcsgD/ΔpurI_{(full clean)}/ΔmsbB_{(full clean)} and YS1646Δasd/ΔFLG/ΔpagP/ΔansB/ΔcsgD, expressing the same plasmid encoding nanoLuciferase® under control of a CMV promoter (a plasmid designated ADN-256), were compared directly by broth growth assay. Overnight stationary phase cultures were adjusted to OD_{600 nm}=1 by dilution in LB media, and 5 μl of the resulting normalized culture was used to inoculate 250 μl of LB media in a 96-well plate, in technical duplicate. The plate was incubated with shaking at 37° C., and the OD_{600 nm} value was monitored in 15 minute intervals over the course of 16 hours. OD_{600 nm} values were plotted to construct growth curves, and the slope of the log phase of growth was calculated and used to determine doubling time for each strain. Four independent growth curves were performed, and the results, depicted in the table below, show that strain YS1646Δasd/ΔFLG/ΔpagP/ΔansB/ΔcsgD-(ADN-256) had an average doubling time of 67.74 minutes (standard deviation (SD)=3.21), while strain YS1646Δasd/ΔFLG/ΔpagP/ΔansB/ΔcsgD/ΔpurI_{(full clean)}/ΔmsbB_{(full clean)}-(ADN-256) had an average doubling time of 60.13 minutes (SD=3.08).

Effects of Clean Deletions of purI and msbB on Growth
of Immunostimulatory Bacteria in Broth Media

| | Doubling Time (minutes) | | | | Average | |
|---|---|---|---|---|---|---|
| | Growth | Growth | Growth | Growth | Doubling | |
| Strain | Curve 1 | Curve 2 | Curve 3 | Curve 4 | Time (mins) | ±SD |
| YS1646Δasd/ΔFLG/ΔpagP/ | 65.39 | 72.20 | 65.39 | 67.96 | 67.74 | 3.21 |
| ΔansB/ΔcsgD-(ADN-256) | | | | | | |
| YS1646Δasd/ΔFLG/ΔpagP/ | 58.25 | 64.18 | 57.28 | 60.80 | 60.13 | 3.08 |
| ΔansB/ΔcsgD/ΔpurI_{(full clean)}/ | | | | | | |
| ΔmsbB_{(full clean)}-(ADN-256) | | | | | | |

SD = Standard deviation

[1244] Strains YS1646Δasd/ΔFLG ΔpagP/ΔansB/ΔcsgD and YS1646Δasd/ΔFLG/ΔpagP/ΔansB/ΔcsgD/ΔpurI_{(full clean)}/ΔmsbB_{(full clean)}, containing the same plasmid (ADN-480, encoding murine 4-1BBLΔcyt, murine IL-12p70, and a modified human STING chimeric protein), were evaluated for broth growth in large, highly aerated shaker flask conditions with rich media (4×YT). 50 μl of overnight stationary phase cultures of equivalent OD_{600 nm} optical densities (ODs) were used to inoculate 12.5 ml of 4×YT media in 125 ml baffled shaker flasks with vented caps, and the cultures were incubated at 37° C. with shaking at 225 RPM. The OD_{600 nm} was monitored in approximately 1 hour intervals, over the course of 18 hours. OD_{600 nm} values were plotted to construct growth curves, and the slope of the log phase of growth was calculated and used to determine the doubling time for each strain.

[1245] The results showed that strain YS1646Δasd/ΔFLG/ΔpagP/ΔansB/ΔcsgD/ΔpurI_{(full clean)}/ΔmsbB_{(full clean)}(ADN-480), which had a doubling time of 41.83 minutes, grew slightly faster and reached stationary phase quicker than strain YS1646Δasd/ΔFLG ΔpagP/ΔansB/ΔcsgD-(ADN-480), which had a doubling time of 48.33 minutes. This data demonstrates an enhanced growth profile for strain YS1646Δasd/ΔFLG/ΔpagP/ΔansB/ΔcsgD/ΔpurI_{(full clean)}/ΔmsbB_{(full clean)}, compared to the parental strain, YS1646Δasd ΔFLG/ΔpagP/ΔansB/ΔcsgD. Strain YS1646Δasd/ΔFLG/ΔpagP/ΔansB/ΔcsgD/ΔpurI_{(full clean)}/ΔmsbB_{(full clean)} grew with faster doubling times in two independent growth curve assays (LB media in a 96-well plate, and rich 4×YT media in a 250 ml shaker flask), indicating that the genomic deletions of purI and msbB not only alleviate a potential genetic stability issue, but also confer a metabolic benefit which allows for faster growth and superior fitness.

[1246] Strain YS1646Δasd/ΔFLG/ΔpagP/ΔansB/ΔcsgD/ΔpurI_{(full clean)}/ΔmsbB_{(full clean)} Displays Enhanced Injection Stock Cell Viability

[1247] To evaluate the effects of the deletions of the remaining purI and msbB gene fragments, the transposon-associated insertion sequence elements, and the pykA gene extension, from the bacterial genome, on the in vitro fitness of the immunostimulatory bacteria, the cell viability of strains YS1646Δasd/ΔFLG/ΔpagP/ΔansB/ΔcsgD/ΔpurI_{(full clean)}/ΔmsbB_{(full clean)} and YS1646Δasd/ΔFLG/ΔpagP/ΔansB/ΔcsgD, containing the same plasmid (ADN-542, encoding a modified human STING chimeric protein), was evaluated by directly comparing viable CFUs after culture processing for frozen injection stocks. 100 μl of overnight stationary phase cultures of equivalent OD_{600 nm} values were used to inoculate 25 ml of 4×YT media in 250 ml baffled shaker flasks with vented caps, and the cultures were incubated at 37° C. shaking at 225 RPM for approximately 6 hours. The cultures were harvested at stationary phase at equivalent OD_{600 nm} values (11.4 for strain YS1646Δasd/ΔFLG/ΔpagP/ΔansB/ΔcsgD-(ADN-542), and 11.7 for strain YS1646Δasd/ΔFLG/ΔpagP/ΔansB/ΔcsgD/ΔpurI_{(full clean)}/ΔmsbB_{(full clean)}-(ADN-542)), washed twice, adjusted to OD_{600 nm}=2, aliquoted, and frozen at −80° C. The following day, two aliquots of each strain were thawed, the OD_{600 nm} values were measured, and the cultures were plated on agar plates to determine titer and viability. % viability was determined by calculating the ratio of OD_{600 nm} to CFUs/ml. The viability of the YS1646Δasd/ΔFLG/ΔpagP/ΔansB/ΔcsgD-(ADN-542) strain injection stock preparation was determined to be 52%, and the viability of the YS1646Δasd/ΔFLG/ΔpagP/ΔansB/ΔcsgD/ΔpurI_{(full clean)}|ΔmsbB_{(full clean)}-(ADN-542) strain injection stock preparation was 96%.

[1248] This data demonstrates an enhanced fitness profile for strain YS1646Δasd/ΔFLG ΔpagP/ΔansB ΔcsgD/ΔpurI_{(full clean)}/ΔmsbB_{(full clean)}, compared to the parental strain, YS1646Δasd ΔFLG ΔpagP/ΔansB/ΔcsgD. Strain YS1646Δasd/ΔFLG/ΔpagP/ΔansB/ΔcsgD/ΔpurI_{(full clean)}/ΔmsbB_{(full clean)} displayed an enhanced viability following frozen injection stock preparation, indicating that the genomic deletions of purI and msbB not only diminish a potential genetic stability issue, but also confer a metabolic benefit, which allows for increased cell viability.

[1249] Strain YS1646Δasd/ΔFLG/ΔpagP/ΔansB/ΔcsgD/ΔpurI_{(full clean)}/ΔmsbB_{(full clean)} Displays Enhanced Plasmid Payload Delivery And Ectopic Gene Expression in the Tumor Microenvironment

[1250] To evaluate plasmid delivery and subsequent ectopic gene expression in the tumor microenvironment, strains YS1646Δasd/ΔFLG/ΔpagP/ΔansB/ΔcsgD and YS1646Δasd/ΔFLG/ΔpagP/ΔansB/ΔcsgD/ΔpurI_{(full clean)}/ΔmsbB_{(full clean)}, containing the same plasmid (ADN-480), encoding murine IL-12 (muIL-12p70) (as well as murine 4-1BBLΔCyt, and a modified human STING chimeric protein), were evaluated in an orthotopic EMT6 mammary carcinoma model in vivo. BALB/c mice received orthotopic implantation with 5×10⁵ EMT6 cells, followed by intravenous injection of 1×10⁷ CFUs of strain YS1646Δasd/ΔFLG/ΔpagP/ΔansB/ΔcsgD-(ADN-480), or strain YS1646Δasd/ΔFLG/ΔpagP/ΔansB/ΔcsgD/ΔpurI_{(full clean)}/ΔmsbB_{(full clean)}-(ADN-480), or PBS, 10 days post implantation. Four days post injection, mice were sacrificed, and the tumors were harvested and processed for analysis of murine IL-12p70 expression by reverse transcription quantitative real-time PCR (RT-qPCR).

[1251] Tumors were resected four days post IV dosing, and cut into 2-3 mm pieces into gentleMACS™ C tubes (Miltenyi Biotec) filled with 2.5 mL enzyme mix (RPMI-1640 containing 10% FBS with 1 mg/mL Collagenase IV and 20 μg/mL DNase I). The tumor pieces were dissociated using OctoMACS™ (Miltenyi Biotec) specific dissociation program (mouse implanted tumors), and the whole cell preparation was incubated with agitation for 45 minutes at 37° C. After the 45 minute incubation, a second round of dissociation was performed using the OctoMACS™ (mouse implanted tumor) program, and the resulting single cell suspensions were filtered through a 70 μM nylon mesh into a 50 mL tube. The nylon mesh was washed once with 5 mL of RPMI-1640 containing 10% FBS, and the cells were filtered a second time using a new 70 μM nylon mesh, into a new 50 mL tube. The nylon mesh was washed with 5 mL of RPMI-1640 containing 10% FBS, and the filtered cells were then centrifuged at 1000 RPM for 7 minutes. The resulting dissociated cells were resuspended in PBS, then lysed with 200 μL RNA Lysis Buffer (Zymo Research), and RNA extraction was performed using the Zymo Research Quick-RNA™ 96 Kit, according to the manufacturer's protocol. Total RNA concentration was measured using a NanoDrop™ 2000 UV-Vis Spectrophotometer (Thermo Fisher Scientific). The purity of each sample also was assessed from the A260/A230 absorption ratio.

[1252] Synthesis of cDNA was performed from 0.5-1 μg of template RNA using a CFX96™ Real-Time PCR Detection System (Bio-Rad) and iScript™ Reverse Transcription Supermix for RT-qPCR (Bio-Rad) in a 20 μL reaction, according to the manufacturer's instructions. A PrimePCR™ Probe Assay for murine IL-12p70 (muIL-12p70) was purchased from Bio-Rad. The qPCR reaction (20 μL) was conducted per protocol, using the iQ™ Multiplex Powermix (Bio-Rad). The standard thermocycling program on the Bio-Rad CFX96™ Real-Time PCR Detection System consisted of a 95° C. denaturation for 150 seconds, followed by 39 cycles of 95° C. for 15 seconds and 60° C. for 55 seconds. All samples were run in triplicate, and the mean C_{q} values were calculated. Quantification of the target mRNA was normalized using actin reference mRNA (Bio-Rad, assay ID: qHsaCEP0036280). ΔC_{q} was calculated as the difference between the target and reference gene. ΔΔC_{q} was obtained by normalizing the ΔC_{q} values of the YS1646Δasd/ΔFLG/ΔpagP/ΔansB/ΔcsgD-(ADN-480) and YS1646Δasd/ΔFLG/ΔpagP/ΔansB/ΔcsgD/ΔpurI_{(full clean)}/ΔmsbB_{(full clean)}-(ADN-480) treated groups to the average ΔC_{q} value of the PBS-treated control group, and the fold increase in murine IL-2p70 expression relative to PBS was calculated as 2\hat{ }-ΔΔC_{q}. Murine IL-12p70 expression in PBS-treated tumors was normalized to a value of 1.0, based on the average ΔC_{q} values.

[1253] As shown in the table below, IV injection of strain YS1646Δasd/ΔFLG/ΔpagP/ΔansB/ΔcsgD-(ADN-480) resulted in an average fold increase of muIL-12p70 expression relative to PBS (2\hat{ }-ΔΔC_{q}) of 5.19, while IV injection of strain YS1646Δasd/ΔFLG/ΔpagP/ΔansB/ΔcsgD/ΔpurI_{(full clean)}/ΔmsbB_{(full clean)}-(ADN-480) resulted in an average fold increase of muIL-12p70 expression relative to PBS (2\hat{ }-ΔΔC_{q}) of 6.52.

[1254] These data demonstrate an enhanced capability for plasmid delivery and induction of ectopic gene expression by strain YS1646Δasd/ΔFLG/ΔpagP/ΔansB/ΔcsgD/ΔpurI_{(full clean)}/ΔmsbB_{(full clean)}, compared to the parental strain, YS1646Δasd/ΔFLG/ΔpagP/ΔansB/ΔcsgD. Strain YS1646Δasd/ΔFLG/ΔpagP/ΔansB/ΔcsgD/ΔpurI_{(full clean)}/ΔmsbB_{(full clean)} displayed increased plasmid delivery and ectopic muIL-12p70 gene expression within the tumor microenvironment, indicating that the genomic deletions of purI and msbB not only diminish a potential genetic stability issue, but also confer an enhanced ability for payload delivery and increased potential for therapeutic efficacy.

Effects of Clean Deletions of purI and msbB on Gene Expression in Tumors

| | Tumor Murine IL-12p70 Expression | | | | | Average | |
|---|---|---|---|---|---|---|---|
| | Tumor | Tumor | Tumor | Tumor | Tumor | Fold | |
| Strain | 1 | 2 | 3 | 4 | 5 | Increase | ±SD |
| PBS | 1 | 1 | 1 | 1 | 1 | 1 | 0 |
| YS1646Δasd/ΔFLG/ΔpagP/ | 6.69 | 2.51 | 2.93 | 7.59 | 6.25 | 5.19 | 2.31 |
| ΔansB/ΔcsgD/-(ADN-480) | | | | | | | |
| YS1646Δasd/ΔFLG/ΔpagP/ | 7.17 | 6.64 | 10.8 | 2.97 | 5.04 | 6.52 | 2.90 |
| ΔansB/ΔcsgD/ΔpurI_{(full clean)}/ | | | | | | | |
| ΔmsbB_{(full clean)}-(ADN-480) | | | | | | | |

SD = Standard deviation

### Example 23

### Infection with Immunostimulatory Bacteria, and with Immunostimulatory Bacteria Transformed with Plasmids Encoding Immunomodulatory Proteins, Converts Human M2 Phenotype Macrophages into M1 Phenotype Macrophages

[1255] It was determined herein whether primary human M2 macrophages, infected with the YS1646Δasd/ΔFLG/ΔpagP/ΔansB/ΔcsgD strain containing a plasmid encoding wild-type (WT) asd, or with the YS1646Δasd/ΔFLG/ΔpagP/ΔansB/ΔcsgD strain containing a plasmid encoding immunostimulatory proteins (such as STING variants, IL-12, IL-15, and IL-21), could be converted to an M1 phenotype (or M1-like phenotype), and express pro-inflammatory surface receptors, such as CD80 and CCR7, and cytokines/chemokines, such as IFNγ and CXCL10 (see, e.g., Gerrick et al. (2018) PLoS ONE 13(12):e0208602).

[1256] Frozen human monocytes, isolated from healthy human donors, were thawed in complete medium (RPMI-1640+10% FBS), and washed by centrifugation for 10 minutes at 600×g at room temperature. To generate primary human M2 macrophages, the monocytes were resuspended in ImmunoCult™-SF Macrophage Medium (StemCell Technologies), containing 100 ng/mL human macrophage colony-stimulating factor (M-CSF)+10 ng/mL human IL-4+10 ng/mL human IL-10. Monocytes (7e5 per well) were then seeded in a 24-well plate, with a final volume of 500 μL. Three days later (on day 3), 500 μL of ImmunoCult™-SF Macrophage Medium containing 200 ng/mL human M-CSF+20 ng/mL human IL-4+20 ng/mL human IL-10 was added per well, and the cells were incubated for 72 hours.

[1257] On day 6, triplicate wells were infected at an MOI of 20, for one hour in RPMI, with the following strains: YS1646Δasd/ΔFLG/ΔpagP/ΔansB/ΔcsgD, containing a plasmid encoding a human (hu) STING variant with the GOF mutations N154S/R284G, and with the C-terminal tail (CTT) of huSTING replaced with the CTT of Tasmanian devil STING (huSTING N154S/R284G tazCTT; SEQ ID NO:397); YS1646Δasd/ΔFLG/ΔpagP/ΔansB/ΔcsgD, containing a plasmid encoding wild-type (WT) huIL-12 and a huSTING N154S/R284G tazCTT variant; YS1646Δasd/ΔFLG/ΔpagP/ΔansB/ΔcsgD, containing a plasmid encoding WT huIL-15; or YS1646Δasd/ΔFLG/ΔpagP/ΔansB/ΔcsgD, containing a plasmid encoding WT huIL-21. The cells were then washed 3 times with PBS, and resuspended in RPMI+100 μg/mL gentamicin (Sigma), to kill any extracellular bacteria (gentamicin cannot permeate into macrophages). As controls, human M1 macrophages, generated in 10 ng/mL LPS+50 ng/mL IFNγ; human M2 macrophages treated with the STING agonist 3′5′ RpRp c-di-AMP (InvivoGen), an analog of the clinical compound ADU-S100; human M2 macrophages re-polarized in 10 ng/mL LPS+50 ng/mL IFNγ; and M2 macrophages infected with strain YS1646Δasd/ΔFLG/ΔpagP/ΔansB/ΔcsgD not containing a plasmid; were included.

[1258] After 48 hours, supernatants were harvested and evaluated for downstream signaling differences using a custom human M2/M1 U-PLEX panel (Meso Scale Discovery), according to the manufacturer's protocol. Cytokine secretion was measured, and the average of the triplicate measurements was calculated. Fold increase in average cytokine secretion was calculated compared to untreated M2 macrophages, in which the average cytokine secretion was set as 1.00.

[1259] To measure the levels of expression of the proinflammatory surface receptors CD80 and CCR7, the cells were lysed with 200 μL RNA Lysis Buffer (Zymo Research), and RNA extraction was performed using the Zymo Research Quick-RNA™ 96 Kit, according to the manufacturer's protocol. Total RNA concentration was measured using a NanoDrop™ 2000 UV-Vis Spectrophotometer (Thermo Fisher Scientific). The purity of each sample also was assessed from the A260/A230 absorption ratio. Synthesis of cDNA was performed from 0.5-1 μg of template RNA using a CFX96™ Real-Time PCR Detection System (Bio-Rad) and iScript™ Reverse Transcription Supermix for RT-qPCR (Bio-Rad) in a 20 μL reaction, according to the manufacturer's instructions. qPCR was performed with a CFX96™ Real-Time PCR Detection System (Bio-Rad). The PrimePCR™ Probe Assay for human CD80 (Assay ID: qHsaCIP0026764) and human CCR7 (Assay ID: qHsaCIP0033364) were purchased from Bio-Rad. The qPCR reaction (20 μL) was conducted per protocol, using the iQ™ Multiplex Powermix (Bio-Rad). The standard thermocycling program on the Bio-Rad CFX96™ Real-Time PCR Detection System consisted of a 95° C. denaturation for 150 seconds, followed by 39 cycles of 95° C. for 15 seconds and 60° C. for 55 seconds. All samples were run in triplicate, and the mean C_{q} values were calculated. Quantification of the target mRNA was normalized using actin reference mRNA (Bio-Rad, Assay ID: qHsaCEP0036280). ΔC_{q} was calculated as the difference between the target and reference gene. ΔΔC_{q} was obtained by normalizing the ΔC_{q} values for the treatments to the ΔC_{q} values for the non-treatment control. Fold increase was calculated as 2\hat{ }-ΔΔC_{q}. The values are shown in the table below, as the average of the triplicate wells.

[1260] As shown in the table below, compared to the untreated M2 macrophages control, in which the average cytokine secretion was set as 1.00, all strains of YS1646Δasd/ΔFLG/ΔpagP/ΔansB/ΔcsgD induced high levels of secretion of IFNγ, CXCL10, and CXCL11. The YS1646Δasd/ΔFLG/ΔpagP/ΔansB/ΔcsgD strains, transformed with plasmids encoding the huSTING N154S/R284G tazCTT variant; or WT huIL-12 and the huSTING N154S/R284G tazCTT variant; or WT huIL-15, induced higher levels of CXCL10 and CXCL11 secretion than the YS1646ΔFLG/ΔpagP/ΔansB/ΔcsgD strain not containing a plasmid. In particular, the YS1646Δasd/ΔFLG/ΔpagP/ΔansB/ΔcsgD strain containing a plasmid encoding WT huIL-15 induced significantly higher levels of CXCL10 and CXCL11 than the STING agonist-treated M2 macrophages and the untreated M1 macrophages. In addition, the YS1646Δasd/ΔFLG/ΔpagP/ΔansB/ΔcsgD strains, containing a plasmid encoding the huSTING N154S/R284G tazCTT variant; or WT huIL-12 and the huSTING N154S/R284G tazCTT variant; or WT huIL-15, induced higher levels of CD80 and CCR7 expression than the YS1646ΔFLG/ΔpagP/ΔansB/ΔcsgD strain not containing a plasmid. While the YS1646Δasd/ΔFLG/ΔpagP/ΔansB/ΔcsgD strains containing plasmids encoding the huSTING N154S/R284G tazCTT variant; or WT huIL-12 and the huSTING N154S/R284G tazCTT variant; or WT huIL-15, induced higher levels of CXCL10, CXCL11, CD80 and CCR7, they induced less IFNγ than the YS1646ΔFLG/ΔpagP/ΔansB/ΔcsgD strain not containing a plasmid. The YS1646Δasd/ΔFLG/ΔpagP/ΔansB/ΔcsgD strain, containing a plasmid encoding WT huIL-21, induced significantly higher levels of CD80 expression than the other YS1646Δasd/ΔFLG/ΔpagP/ΔansB/ΔcsgD strains, but induced lower levels of IFNγ, CXCL10, CXCL11, and CCR7 expression.

[1261] These data demonstrate the ability of a strain, such as the strain designated as YS1646Δasd/ΔFLG/ΔpagP/ΔansB/ΔcsgD, alone, or such strain containing plasmids encoding one or more immunostimulatory proteins, to convert a human primary, immunosuppressive M2 phenotype macrophage, into an M1 or M1-like phenotype macrophage, with immunosuppressive properties reduced or eliminated, and immune-stimulating, anti-tumor, or anti-viral properties enhanced or added.

Expression of IFNγ, CXCL10, CXCL11, CD80 and CCR7 in
M2 Macrophages Infected with Immunostimulatory Bacteria

| | Fold Cytokine/ | | | Fold Receptor | |
|---|---|---|---|---|---|
| | Chemokine | | | Expression | |
| | Secretion Over | | | Over | |
| | Uninfected M2 | | | Uninfected M2 | |
| | Control | | | Control | |
| Treatments | IFNγ | CXCL10 | CXCL11 | CD80 | CCR7 |
| M1 Macrophages, Untreated | 25131.7 | 106.6 | 89.5 | 335.0 | 2186.7 |
| M2 + STING Agonist | 5.2 | 106.9 | 199.3 | 54.0 | 47.8 |
| M2 + LPS + IFNγ | 25065.8 | 92.5 | 186.3 | 81.9 | 1002.3 |
| M2 + YS1646 | 732.2 | 46.6 | 45.1 | 0.8 | 0.7 |
| Δasd/ΔFLG/ΔpagP/ΔansB/ΔcsgD | | | | | |
| M2 + | 657.1 | 93.9 | 65.7 | 6.3 | 2.9 |
| YS1646Δasd/ΔFLG/ΔpagP/ΔansB/ | | | | | |
| ΔcsgD + STING variant | | | | | |
| M2 + | 398.4 | 111.2 | 84.0 | 2.1 | 79.0 |
| YS1646Δasd/ΔFLG/ΔpagP/ΔansB/ | | | | | |
| ΔcsgD + STING variant + IL-12 | | | | | |
| M2 + | 383.5 | 144.3 | 223.8 | 5.4 | 31.3 |
| YS1646Δasd/ΔFLG/ΔpagP/ΔansB/ | | | | | |
| ΔcsgD + IL-15 | | | | | |
| M2 + | 176.7 | 15.8 | 14.5 | 55.9 | 0.3 |
| YS1646Δasd/ΔFLG/ΔpagP/ΔansB/ | | | | | |
| ΔcsgD + IL-21 | | | | | |

STING Agonist = 3′5′ RpRp c-di-AMP;
LPS = lipopolysaccharide;
STING variant = huSTING N154S/R284G tazCTT

### Example 24

### IV-Delivered Strains of YS1646Δasd/ΔFLG/ΔpagP/ΔansB/ΔcsgD, Containing Plasmids Encoding IL-15, or Encoding the Combination of 4-1BBL and IL-12, Demonstrate Enhanced Efficacy and Induce Durable Anti-tumor Immunity in a

[1262] Mouse Model of Colorectal Carcinoma The anti-tumor efficacy of the YS1646Δasd/ΔFLG/ΔpagP/ΔansB/ΔcsgD strain, containing plasmids encoding murine IL-15 (muIL-15Rα-IL-15sc); or murine IL-12p70 (muIL-12p70); or murine 4-1BBL containing a cytoplasmic domain deletion (mu4-1BBL(Δcyt)); or a combination of muIL-12p70 and mu4-1BBL(Δcyt), was assessed in the subcutaneous flank MC38 colorectal adenocarcinoma model. For this study, 6-8 week-old female C57BL/6 mice (8 mice per group) were inoculated SC in the right flank with MC38 cells (5×10⁵ cells in 100 μL PBS). Mice bearing established flank tumors were IV injected on day 7 with 2×10⁷ CFUs of strain YS1646Δasd/ΔFLG/ΔpagP/ΔansB/ΔcsgD-muIL-15Rα-IL-15sc, or strain YS1646Δasd/ΔFLG/ΔpagP/ΔansB/ΔcsgD-muIL-12p70, or strain YS1646Δasd/ΔFLG/ΔpagP/ΔansB/ΔcsgD-mu4-1BBL(Δcyt), or strain YS1646Δasd/ΔFLG/ΔpagP/ΔansB/ΔcsgD-muIL-12p70+4-1BBL(Δcyt), or with PBS vehicle control. Tumor measurements and body weights were recorded twice weekly.

[1263] The results revealed that the YS1646Δasd/ΔFLG/ΔpagP/ΔansB/ΔcsgD-muIL-15Ra-IL-15sc strain demonstrated significant tumor growth inhibition (TGI) compared to PBS (70.9% TGI, day 24), with a cure rate of 4 out of 8 mice (50%). The YS1646Δasd/ΔFLG/ΔpagP/ΔansB/ΔcsgD-muIL-12p70 strain demonstrated significant TGI compared to PBS (81.1% TGI, day 24), with a cure rate of 2 out of 8 mice (25%). The YS1646Δasd/ΔFLG/ΔpagP/ΔansB/ΔcsgD-mu4-1BBL(ΔCyt) strain also demonstrated a high degree of TGI compared to PBS (81.0% TGI, day 24), and also resulted in a cure rate of 2 out of 8 mice (25%). The strain expressing the combination of muIL-12p70 and mu4-1BBL(Δcyt) demonstrated the highest TGI (90.6% TGI, day 24), with 4 out of 8 mice achieving complete cures (50% cure rate). Thus, the immunostimulatory bacterial strains expressing muIL-15Rα-IL-15sc, or the combination of 4-1BBL(Δcyt) and IL-12p70, more potently inhibit tumor growth inhibition than the strains expressing 4-1BBL(Δcyt) or IL-12p70 alone, and result in a high complete response rate (50% cure rate) in a model of colorectal carcinoma.

[1264] All cured mice continued to remain tumor-free, and on day 66 post-tumor implantation, the mice were re-challenged on the opposite flank with MC38 cells (5×10⁵ cells in 100 μL PBS), and compared to naïve (no previous tumor implantation), age-matched mice. Compared to the naïve mice, which had reached an average tumor size of 1384.7 mm³ by day 26 post-tumor implantation, each of the previously cured (and re-challenged) mice remained tumor free. These data demonstrate the ability of the mice treated with any of strains YS1646Δasd/ΔFLG/ΔpagP/ΔansB/ΔcsgD-muIL-15Rα-IL-15sc, YS1646Δasd/ΔFLG/ΔpagP/ΔansB/ΔcsgD-muIL-12p70, YS1646Δasd/ΔFLG/ΔpagP/ΔansB/ΔcsgD-mu4-1BBL(Δcyt), or YS1646Δasd/ΔFLG/ΔpagP/ΔansB/ΔcsgD-muIL-12p70+mu4-1BBL(Δcyt), to generate durable anti-tumor immunity that prevents tumor recurrence, and protects from tumor re-challenge.

### Example 25

### Deletion and/or Disruption of csgD, lppAB, pagP, and FLG, and their Combination, Results in Strains with Significantly Higher Viability in Human Serum, Compared to Strain YS1646

[1265] Strain YS1646 exhibits limited tumor colonization in humans after systemic administration. It is shown herein that strain YS1646 is inactivated by complement factors in human blood (see, Example 5). In this Example, strains YS1646 and E. coli D10B were compared to exemplary immunostimulatory bacteria provided herein, that contain additional mutations that alter the surface of the bacteria. These exemplary modified strains were YS1646Δasd/ΔFLG/ΔpagP, YS1646Δasd/ΔFLG/ΔpagP/ΔansB/ΔcsgD, and YS1646Δasd/ΔFLG/ΔpagP/ΔansB/ΔcsgD/ΔlppAB, each containing the plasmid ADN-256, which encodes a secreted NanoLuciferase® (secNanoLuc®), under the control of a CMV promoter. These three strains, in addition to YS1646 and E. coli D10B cultures, were incubated in technical triplicate with serum, or heat-inactivated (HI) serum, from healthy human donors (n=3), for 3 hours at 37° C. After incubation with serum, bacteria were serially diluted and plated on LB agar plates, and the colony forming units (CFUs) were determined. % survival was determined by calculating the CFUs present in whole serum, versus the CFUs present in heat-inactivated serum.

[1266] The results showed that all strains were 100% viable in the heat-inactivated human serum. The E. coli D10B strain was completely eliminated after 3 hours in whole human serum, while strain YS1646 exhibited an average of only 12.22% survival, demonstrating that tumor colonization of the YS1646 clinical strain was limited due to complement inactivation in human blood. Strain YS1646Δasd/ΔFLG/ΔpagP demonstrated an average of 74.56% survival after incubation with human serum for 3 hours, while strains YS1646Δasd/ΔFLG/ΔpagP/ΔansB/ΔcsgD and YS1646Δasd/ΔFLG/ΔpagP/ΔansB/ΔcsgD/ΔlppAB displayed average % survivals of 129.56% and 158.33%, respectively. The YS1646Δasd/ΔFLG/ΔpagP/ΔansB/ΔcsgD and YS1646Δasd/ΔFLG/ΔpagP/ΔansB/ΔcsgD/ΔlppAB strains demonstrated survival greater than 100%, indicating that they are completely resistant to complement inactivation in human serum.

[1267] These data explain why strain YS1646 (VNP20009) has very low tumor colonization when systemically administered. It is shown herein that strain YS1646 is highly sensitive to complement inactivation in human serum. The fljB/fliC (FLG), pagP, csgD, and lppAB deletions/disruptions, or the combination of these mutations, partially or completely rescues this phenotype. Thus, the enhanced stability observed in human serum with the YS1646Δasd/ΔFLG/ΔpagP, YS1646Δasd/ΔFLG/ΔpagP/ΔansB/ΔcsgD, and YS1646Δasd/ΔFLG/ΔpagP/ΔansB/ΔcsgD/ΔlppAB strains provides for increased human tumor colonization.

### Example 26

### Combinations of Therapeutic Products Encoded on the Plasmids, Including Cytokines, STING Variants, Anti-CTLA-4 Antibodies, 4-1BBL, and Anti-4-1BBL Agonistic Antibodies, Potently Induce the Secretion of CXCL10 from Myeloid Cells and Induce the Activation of T-Cells

[1268] The impact of the expression of the immunomodulatory payloads and their combinations, encoded on the plasmids in the immunostimulatory bacteria, on the activation and function of T-cells and myeloid cells was determined. The secretion of cytokines and chemokines, such as IFN-γ and CXCL10, by myeloid cells and T-cells, in response to the expression of various immunomodulatory payloads, was measured as an indicator of protective anti-tumor immunity. The secretion of the pro-tumor, inflammatory cytokine IL-6, also was monitored in parallel.

[1269] This Example describes and demonstrates the impact of the delivery of various immunomodulatory payload combinations by the immunostimulatory bacteria herein on the activation of antigen-specific T-cells, and on the secretion of CXCL10, a key chemokine involved in the recruitment of anti-tumor T-cells, by myeloid cells. This was assessed by transfecting mouse dendritic cells with plasmids encoding various combinations of payloads, co-culturing the transfected dendritic cells with autologous mouse T-cells, and identifying and quantifying the cytokines secreted by each cell type.

[1270] The plasmids encoding the immunomodulatory payloads/proteins included those encoding single payloads, as well as those encoding combinations of payloads. For example, as shown in the table below, single payloads included secreted NanoLuc®; murine IL-12p70 (muIL-12p70); STING R284G tazCTT (a chimeric protein containing human STING with the mutation R284G and a replacement of the C-terminal tail (CTT) of human STING with the CTT of Tasmanian devil STING); a murine anti-CTLA-4 scFv (clone 9D9); murine 4-1BBL with a deleted cytoplasmic domain (mu4-1BBL(Δcyt)); murine IL-18 (muIL-18); and murine IL-21 (muIL-21).

[1271] Combinations of payloads, including two or three payloads, were expressed on a single plasmid using T2A and/or P2A peptides, such that multiple proteins were encoded under the control of the same promoter. The combinations of payloads included, for example: 1) murine IL-18 and murine IL-12p70; 2) murine IL-21 and murine IL-12p70; 3) murine IL-12p70 and STING R284G tazCTT; 4) murine IL-12p70, an anti-murine CTLA-4 scFv, and STING R284G tazCTT; 5) an anti-murine CTLA-4 scFv, murine IL-12p70, and STING R284G tazCTT; 6) an anti-murine CTLA-4 scFv and murine IL-12p70; 7) an anti-murine CTLA-4 scFv, and STING R284G tazCTT; 8) murine IL-21, murine IL-12p70, and STING R284G tazCTT; 9) murine 4-1BBL(Δcyt) and STING R284G tazCTT; 10) murine 4-1BBL(ΔCyt) and murine IL-12p70; and 11) murine 4-1BBL(ΔCyt), murine IL-12p70, and STING R284G tazCTT.

[1272] Bone marrow-derived dendritic cells (BMDCs) were generated from Goldenticket mice, which are STING deficient, and were transfected with plasmids encoding various combinations of the investigated payloads. Twenty-four hours post-transfection, supernatants were harvested and the levels of secreted CXCL10 were measured in BMDC culture supernatants, using a U-Plex assay platform from Meso Scale Discovery, according to the manufacturer's protocol.

[1273] To measure CD8⁺ T-cell activation, transfected BMDCs were pulsed with chicken ovalbumin (OVA) SIINFEKL (OVA257-264) peptide, a major histocompatibility complex (MHC) class I (H-2Kb)-restricted peptide epitope recognized by CD8⁺ T-cells. Splenic T-cells, isolated from Rag1^{-/-} OT-I mice, which express T-cell receptors (TCRs) that are specific for SIINFEKL presented by the MHC class I molecule H-2Kb, were added to the BMDCs for co-culture. After 72 hours of BMDC/T-cell co-culture, supernatants were harvested, and the levels of secreted IFN-γ were measured in the cell culture supernatants, using a cytometric bead array (CBA) kit.

[1274] The results are summarized in the table below, which shows the levels of CXCL10 secreted by BMDCs in response to transfection with plasmids encoding the various single and combination payloads, as well as the levels of IFN-γ secreted by CD8⁺ T-cells, following co-culture with the transfected BMDCs.

[1275] The results show the specific combinations of encoded payloads that induce high levels of secretion of CXCL10 by BMDCs, and show that a synergy is observed when combining payloads. For example, synergy was observed between muIL-12p70 and STING R284G tazCTT expression. The combinations of mu4-1BBL(Δcyt) or an anti-murine CTLA-4 antibody fragment, with STING R284G tazCTT expression, also results in higher levels of secretion of CXCL10 by BMDCs. The results also show that the expression of muIL-12p70, as well as several of the combinations of payloads, such as muIL-18 and muIL-12p70; muIL-21 and muIL-12p70; muIL-12p70 and STING R284G tazCTT; muIL-12p70, the anti-murine CTLA-4 scFV, and STING R284G tazCTT; the anti-murine CTLA-4 scFV and muIL-12p70; and mu4-1BBL(Δcyt) and muIL-12p70, by BMDCs, induces the activation of CD8⁺ T-cell responses, and the secretion of IFN-γ.

Effects of Delivery of Single and Combination Payloads on Secretion
of CXCL10 by BMDCs and on Activation of CD8⁺ T-cells

| | CXCL10 | | IFN-γ Secreted by | |
|---|---|---|---|---|
| | Secreted by | | CD8⁺ T-Cells | |
| | BMDCs (pg/ml) | | (pg/ml) | |
| BMDC Treatments (Transfections) | Mean | SEM | Mean | SEM |
| Untransfected BMDCs (control) | 70 | 14 | 1195 | 9 |
| Secreted NanoLuc ® | 142 | 36 | 2003 | 157 |
| muIL-12p70 | 155 | 27 | 15149 | 987 |
| STING R284G tazCTT | 253 | 49 | 1686 | 52 |
| Anti-murine CTLA-4 scFv | 80 | 3 | 1873 | 27 |
| mu4-1BBL(Δcyt) | 236 | 66 | 1450 | 330 |
| muIL-18 | 69 | 20 | 1891 | 149 |
| muIL-21 | 84 | 6 | 2028 | 188 |
| muIL-18_T2A_muIL-12p70 | 95 | 7 | 6730 | 879 |
| muIL-21_T2A_muIL-12p70 | 143 | 19 | 7944 | 342 |
| muIL-12p70_T2A_STING R284G tazCTT | 1843 | 248 | 11669 | 1399 |
| muIL-12p70_T2A_anti-murine CTLA-4 | 1508 | 34 | 11652 | 1351 |
| scFv_P2A_STING R284G tazCTT | | | | |
| anti-murine CTLA-4 scFv_T2A_muIL- | 157 | 42 | 2675 | 326 |
| 12p70_P2A_STING R284G tazCTT | | | | |
| anti-murine CTLA-4 scFv_T2A_muIL- | 128 | 45 | 6696 | 888 |
| 12p70 | | | | |
| anti-murine CTLA-4 scFv_T2A_STING | 604 | 100 | 1891 | 96 |
| R284G tazCTT | | | | |
| muIL-21_T2A_muIL-12p70_P2A_STING | 164 | 23 | 2209 | 305 |
| R284G tazCTT | | | | |
| mu4-1BBL(Δcyt)_T2A_STING R284G | 469 | 38 | 1648 | 271 |
| tazCTT | | | | |
| mu4-1BBL(Δcyt)_T2A_muIL-12p70 | 98 | 12 | 6105 | 482 |
| mu4-1BBL(Δcyt)_T2A_muIL- | 213 | 64 | 2218 | 936 |
| 12p70_P2A_STING R284G tazCTT | | | | |

SEM = Standard Error of the Mean

[1276] The same biological responses were investigated when combining the payloads listed above with one or more of murine (mu) IL-36γ, muIL-23, muOX40L, and muIFN-α2. BMDCs were isolated from STING-deficient Goldenticket mice, and were transfected with plasmids encoding various combinations of payloads, as shown in the table below. Twenty-four hours post-transfection, the levels of secreted CXCL10, IFN-γ, and IL-6 were measured in BMDC culture supernatants using a cytometric bead array (CBA) kit. As described above, BMDCs were pulsed with ovalbumin SIINFEKL antigenic peptides, before the addition of splenic T-cells from Rag1^{-/-} OT-I mice (OT-I cells). After 30 hours of BMDC/T-cell co-culture, the levels of secreted IFN-γ were measured in the cell culture supernatants using a CBA kit. T-cells were stained with an APC-conjugated anti-murine 4-1BB antibody (clone 17B5, BioLegend), to monitor the expression of the activation marker 4-1BB.

[1277] The results, which are summarized in the table below, show that specific combinations of payloads, such as muIL-36γ+muIL-12p70+STING R284G TazCTT, and muIL-36γ+muIL-23+STING R284G TazCTT, induce high levels of secretion of CXCL10 by BMDCs. The combination of muIL-36γ with muIL-12p70 and STING R284G tazCTT also induces high levels of secretion of IFN-γ by BMDCs, but relatively low levels of IL-6 secretion, representing a therapeutically useful combination for the induction of anti-tumor immunity.

[1278] The results also show that many of the combinations listed in the table below induce the activation of CD8⁺ T-cell responses, as assessed by 4-1BB expression and secretion of IFN-γ. For example, the combination of muIL-36γ+muIL-12p70+STING R284G TazCTT induced the highest levels of IFN-γ secretion by the CD8⁺ T-cells, and induced a high level of 4-1BB expression, indicating efficient activation and functionality of CD8⁺ T-cells, which is critical for the generation of proper anti-tumor immunity.

Cytokine Secretion by BMDCs and CD8⁺ T-Cell Activation Following Transfection
of BMDCs with Plasmids Encoding Combinations of Immunomodulatory Payloads

| | | | | IFN-γ | | |
|---|---|---|---|---|---|---|
| | | | | Secretion by | | |
| | Cytokine Secretion by | | | CD8⁺ T Cells | | % |
| BMDC Treatments | BMDCs (pg/ml) | | | (pg/ml) | | Expression |
| (Transfection) | CXCL10 | IFN-γ | IL-6 | IFN-γ | SEM | 4-1BB |
| Untransfected BMDCs | 26 | 0 | 6 | 1616 | 46 | 12 |
| (control) | | | | | | |
| Secreted NanoLuc ® | 99 | 0 | 16 | 1606 | 48 | 16 |
| STING R284G tazCTT | 576 | 0 | 22 | 1920 | 49 | 17 |
| muIL-12p70 | 181 | 14 | 21 | 7077 | 932 | 30 |
| mu4-1BBL(Δcyt) | 181 | 0 | 11 | 1628 | 53 | 26 |
| muIFN-α2 | 347 | 0 | 47 | 1841 | 350 | 23 |
| muIL-36γ | 216 | 0 | 18 | 1532 | 8 | 26 |
| muIL-23 | 143 | 1 | 15 | 1352 | 83 | 29 |
| muOX40L | 125 | 0 | 18 | 1827 | 140 | 29 |
| muIL-36γ_T2A_muIL-12p70 | 131 | 14 | 18 | 3550 | 587 | 37 |
| muIL-36γ_T2A_muIL- | 2788 | 49 | 33 | 4286 | 51 | 33 |
| 12p70_P2A_STING R284G | | | | | | |
| tazCTT | | | | | | |
| muIL-36γ_T2A_muIL-23 | 848 | 0 | 85 | 1880 | 56 | 28 |
| muIL-36γ_T2A_STING | 637 | 0 | 266 | 1341 | 37 | 33 |
| R284G tazCTT | | | | | | |
| muIL-36γ_T2A_muIL- | 1270 | 1 | 49 | 1375 | 28 | 30 |
| 23_P2A_STING R284G | | | | | | |
| tazCTT | | | | | | |
| muIL-36γ_T2A_muIL- | 101 | 0 | 39 | 1554 | 25 | 34 |
| 23_P2A_muOX40L | | | | | | |
| muIL-36γ_T2A_muIL- | 240 | 11 | 39 | 3939 | 268 | 35 |
| 12p70_P2A_muOX40L | | | | | | |
| muIFN-α2_T2A_muIL-36γ | 339 | 0 | 31 | 1409 | 142 | 28 |
| muIL-36γ_T2A_muIFN-α2 | 208 | 0 | 26 | 1361 | 84 | 31 |
| mu4- | 177 | 0 | 12 | 1492 | 13 | 15 |
| 1BBL(Δcyt)_T2A_muIL-36γ | | | | | | |

SEM = Standard Error of the Mean

[1279] The effects on T-cell function of various combinations of payloads and receptor-ligand interactions also were investigated by treating murine pooled CD4⁺ and CD8⁺ T-cells with recombinant cytokines and agonistic antibodies. Splenic T-cells (CD4⁺ and CD8⁺) from BALB/c mice were negatively isolated, and then treated with 2.5 nM of one or more recombinant cytokines (e.g., muIL-12p70; muIL-15 complex (muIL-15Rα-IL-15sc); muIL-21; muIL-36γ; muIFN-α2; and combinations thereof), and/or 1.5 μg/ml of an anti-murine 4-1BB agonistic antibody (Clone 17B5, BioLegend). After 24 hours of treatment, the levels of secreted IFN-γ and IL-6 were measured in the T-cell culture supernatants using a CBA kit.

[1280] The results, which are shown in the table below, demonstrate that several combinations of cytokines, with or without the addition of an anti-murine 4-1BB agonist antibody, activate T-cells. For example, the combinations of muIL-12p70+muIL-15 complex (muIL-15Rα-IL-15sc); muIL-12p70+muIL-15 complex+muIFN-α2; muIL-12p70+muIL-15 complex+anti-murine 4-1BB agonistic antibody; muIL-12p70+muIL-15 complex+muIL-36γ; muIL-12p70+muIL-15 complex+muIL-21; muIL-12p70+muIL-21+muIL-36γ; muIL-12p70+muIL-36γ+muIFN-α2; muIL-12p70+muIL-36γ+anti-murine 4-1BB agonistic antibody; muIL-15 complex+muIL-36γ+muIFN-α2; and muIL-15 complex+muIL-36γ+anti-murine 4-1BB agonistic antibody, result in the secretion of high levels of IFN-γ, but relatively low levels of IL-6, from T-cells, making them ideal combinations for optimal T-cell activation, for the induction of anti-tumor immunity in the tumor microenvironment.

Effects of Treatment with Various Cytokines and/or Anti-Murine 4-1BB Agonist
Antibody and/or Combinations Thereof on the ActivationofT-Cells

| | Secretion by Murine CD4⁺ and | | | |
|---|---|---|---|---|
| | CD8⁺ T-Cells | | | |
| | IFN-γ (pg/ml) | | IL-6 (pg/ml) | |
| Treatments | Mean | SEM | Mean | SEM |
| No cytokine (untreated control) | 1 | 0 | 125 | 8 |
| muIL-12p70 | 83 | 8 | 151 | 2 |
| muIL-15 complex (muIL-15Rα-IL-15sc) | 21 | 2 | 187 | 22 |
| muIL-21 | 1 | 0 | 135 | 20 |
| muIL-36γ | 5 | 3 | 496 | 23 |
| muIFN-α2 | 3 | 1 | 129 | 19 |
| Anti-murine 4-1BB agonistic antibody | 1 | 0 | 139 | 15 |
| muIL-12p70 + muIL-15 complex | 1808 | 93 | 120 | 23 |
| muIL-12p70 + muIL-21 | 122 | 33 | 140 | 23 |
| muIL-12p70 + anti-murine 4-1BB agonistic | 100 | 9 | 160 | 1 |
| antibody | | | | |
| muIL-12p70 + muIL-36γ | 6655 | 115 | 467 | 61 |
| muIL-12p70 + muIFN-α2 | 84 | 2 | 140 | 10 |
| muIL-15 complex + muIFN-α2 | 97 | 12 | 57 | 1 |
| muIL-15 complex + muIL-21 | 23 | 1 | 108 | 1 |
| muIL-15 complex + muIL-36γ | 2790 | 262 | 377 | 29 |
| muIL-15 complex + anti-murine 4-1BB agonistic | 40 | 5 | 134 | 23 |
| antibody | | | | |
| muIL-21 + muIFN-α2 | 2 | 0 | 77 | 15 |
| muIL-21 + muIL-36γ | 62 | 13 | 304 | 31 |
| muIL-21 + anti-murine 4-1BB agonistic antibody | 10 | 5 | 85 | 4 |
| muIL-36γ + muIFN-α2 | 55 | 8 | 234 | 14 |
| muIL-36γ + anti-murine 4-1BB agonistic | 18 | 1 | 393 | 69 |
| antibody | | | | |
| muIFN-α2 + anti-murine 4-1BB agonistic | 1 | 0 | 58 | 1 |
| antibody | | | | |
| muIL-12p70 + muIL-15 complex + muIFN-α2 | 1655 | 542 | 64 | 5 |
| muIL-12p70 + muIL-15 complex + anti-murine | 3703 | 1104 | 127 | 22 |
| 4-1BB agonistic antibody | | | | |
| muIL-12p70 + muIL-15 complex + muIL-36γ | 24293 | 3266 | 260 | 13 |
| muIL-12p70 + muIL-15 complex + muIL-21 | 1496 | 83 | 74 | 4 |
| muIL-12p70 + muIL-21 + muIFN-α2 | 61 | 7 | 56 | 13 |
| muIL-12p70 + muIL-21 + anti-murine 4-1BB | 91 | 10 | 84 | 8 |
| agonistic antibody | | | | |
| muIL-12p70 + muIL-21 + muIL-36γ | 6587 | 538 | 243 | 12 |
| muIL-12p70 + muIL-36γ + muIFN-α2 | 5559 | 470 | 243 | 7 |
| muIL-12p70 + muIL-36γ + anti-murine 4-1BB | 10191 | 2139 | 191 | 9 |
| agonistic antibody | | | | |
| muIL-12p70 + muIFN-α2 + anti-murine 4-1BB | 99 | 3 | 48 | 0 |
| agonistic antibody | | | | |
| muIL-15 complex + muIL-21 + muIFN-α2 | 70 | 3 | 44 | 5 |
| muIL-15 complex + muIL-36γ + muIFN-α2 | 1539 | 24 | 145 | 11 |
| muIL-15 complex + muIL-36γ + anti-murine 4- | 2764 | 672 | 261 | 2 |
| 1BB agonistic antibody | | | | |
| muIL-15 complex + muIFN-α2 + anti-murine 4- | 104 | 3 | 49 | 15 |
| 1BB agonistic antibody | | | | |
| muIL-15 complex + muIL-21 + anti-murine 4- | 37 | 3 | 50 | 1 |
| 1BB agonistic antibody | | | | |
| muIL-21 + muIL-36γ + muIFN-α2 | 62 | 7 | 111 | 3 |
| muIL-21 + muIL-36γ + anti-murine 4-1BB | 25 | 8 | 175 | 11 |
| agonistic antibody | | | | |
| muIL-36γ + muIFN-α2 + anti-murine 4-1BB | 47 | 7 | 158 | 21 |
| agonistic antibody | | | | |

SEM = Standard Error of the Mean;
muIL-15 complex = muIL-15Rα-IL-15sc

[1281] The effects of treatment with one or more recombinant human cytokines and/or an anti-human 41BB antibody (clone 4B4-1, BioLegend), on the activation of human T-cells, was assessed. Human CD4⁺ and CD8⁺ T-cells were negatively isolated from human peripheral blood mononuclear cells (PBMCs) and treated with 1 nM of recombinant cytokines, with or without T-cell receptor (TCR) and 4-1BB stimulation, using coated agonistic anti-human CD3c (clone OKT3, BioLegend) and anti-human 4-1BB (clone 4B4-1, BioLegend) antibodies, respectively. After 24 hours and 72 hours of treatment, the supernatants were harvested, and the levels of secreted IFN-γ were measured in the cell culture supernatants using a CBA kit. T-cells also were stained with a phycoerythrin (PE)-conjugated anti-human CD25 antibody (clone BC96, BioLegend), to monitor the expression of the activation marker CD25.

[1282] The results, which are summarized in the two tables below, show that several combinations of cytokines (IL-12p70, IL-15, IL-21, and IL-36γ) and 4-1BB engagement, activate T-cells to secrete high levels of IFN-γ, with and without TCR stimulation by an anti-CD3c agonistic antibody, for CD4⁺ and CD8⁺ T-cells. CD4⁺ and CD8⁺ T-cells expressed the activation marker CD25, in response to treatment with various combinations of human cytokines and/or an anti-human 4-1BB agonistic antibody, particularly after stimulation with an anti-CD3c agonistic antibody. The expression of CD25 was much more pronounced in CD8⁺ T-cells, with a percentage of cells positive for CD25 of above 90% for all treated groups (which is why the Mean fluorescence intensity (MFI) is provided below as a measure of the CD25 expression with CD3c stimulation in CD8⁺ T-cells). This is because CD25 is a well-established activation marker for CD8⁺ T-cells (more so than for CD4⁺ T-cells), and CD8⁺ T-cells are more reactive to the stimuli for that activation marker.

Effects of Treatment with Various Human Cytokines and/or an Anti-Human 4-1BB Agonist
Antibody and/or Combinations Thereof on the Secretion of IFN-γ by T-Cells

| | | | 24 Hours, with | | | | 72 Hours, with | |
|---|---|---|---|---|---|---|---|---|
| | 24 Hours, | | CD3ε | | 72 Hours, | | CD3ε | |
| | Unstimulated | | Stimulation | | Unstimulated | | Stimulation | |
| | Mean | | Mean | | Mean | | Mean | |
| | Secreted | | Secreted | | Secreted | | Secreted | |
| | IFN-γ | | IFN-γ | | IFN-γ | | IFN-γ | |
| Treatments | (pg/ml) | SEM | (pg/ml) | SEM | (pg/ml) | SEM | (pg/ml) | SEM |
| No cytokine | 11 | 0 | 17335 | 7241 | 10 | 2 | 2123 | 852 |
| (untreated | | | | | | | | |
| control) | | | | | | | | |
| IL-12p70 | 10916 | 194 | 98371 | 2829 | 14060 | 1786 | 25143 | 89 |
| IL-15 | 1596 | 514 | 40517 | 104 | 1823 | 1027 | 9373 | 143 |
| IL-21 | 154 | 47 | 17968 | 437 | 79 | 14 | 1393 | 82 |
| IL-36γ | 30 | 19 | 12217 | 2075 | 12 | 0 | 2104 | 420 |
| Anti-4-1BB | 19 | 10 | 19362 | 3461 | 14 | 5 | 3330 | 788 |
| agonistic | | | | | | | | |
| antibody | | | | | | | | |
| IL-12p70 + | 75903 | 9641 | 131979 | 613 | 165517 | 7174 | 48166 | 1724 |
| IL-15 | | | | | | | | |
| IL-12p70 + | 19165 | 2843 | 95734 | 3754 | 19830 | 4954 | 28214 | 758 |
| IL-21 | | | | | | | | |
| IL-12p70 + | 20079 | 6046 | 91096 | 610 | 29878 | 10848 | 26385 | 2795 |
| IL-36γ | | | | | | | | |
| IL-12p70 + | 15052 | 1557 | 99653 | 1322 | 30903 | 2424 | 29248 | 260 |
| anti-4-1BB | | | | | | | | |
| agonistic | | | | | | | | |
| antibody | | | | | | | | |
| IL-15 + IL-21 | 5394 | 817 | 29765 | 7463 | 5312 | 241 | 5897 | 2085 |
| IL-15 + IL-36γ | 5788 | 1281 | 40881 | 238 | 5954 | 721 | 10295 | 146 |
| IL-15 + anti-4- | 1708 | 259 | 37833 | 5210 | 5208 | 3977 | 9015 | 1679 |
| 1BB agonistic | | | | | | | | |
| antibody | | | | | | | | |
| IL-21 + IL-36γ | 638 | 176 | 22612 | 2 | 356 | 72 | 1776 | 157 |
| IL-21 + anti-4- | 128 | 64 | 19102 | 76 | 95 | 33 | 1348 | 196 |
| 1BB agonistic | | | | | | | | |
| antibody | | | | | | | | |
| IL-36γ + anti- | 10 | 1 | 12714 | 1165 | 8 | 0 | 2116 | 356 |
| 4-1BB | | | | | | | | |
| agonistic | | | | | | | | |
| antibody | | | | | | | | |
| IL-12p70 + | 64847 | 1957 | 124755 | 6662 | 126040 | 7660 | 49433 | 2130 |
| IL-15 + IL-21 | | | | | | | | |
| IL-12p70 + | 70049 | 3270 | 122175 | 1139 | 158389 | 3106 | 49668 | 21 |
| IL-15 + IL-36γ | | | | | | | | |
| IL-12p70 + | 99206 | 2970 | 132011 | 3779 | 208361 | 6574 | 45361 | 817 |
| IL-15 + anti-4- | | | | | | | | |
| 1BB agonistic | | | | | | | | |
| antibody | | | | | | | | |
| IL-12p70 + | 14321 | 237 | 88340 | 2001 | 18015 | 2207 | 27797 | 2142 |
| IL-21 + IL36γ | | | | | | | | |
| IL-12p70 + | 4394 | 395 | 95440 | 2439 | 4816 | 541 | 28580 | 17 |
| IL-21 + anti-4- | | | | | | | | |
| 1BB agonistic | | | | | | | | |
| antibody | | | | | | | | |
| IL-12p70 + | 8012 | 2959 | 98147 | 2938 | 11193 | 4687 | 31059 | 2344 |
| IL-36γ + anti- | | | | | | | | |
| 4-1BB | | | | | | | | |
| agonistic | | | | | | | | |
| antibody | | | | | | | | |
| IL-15 + IL-21 + | 5401 | 2501 | 41892 | 2614 | 4797 | 2145 | 7411 | 812 |
| IL-36γ | | | | | | | | |
| IL-15 + IL-21 + | 6398 | 2097 | 47003 | 5628 | 5522 | 2046 | 8950 | 999 |
| anti-4-1BB | | | | | | | | |
| agonistic | | | | | | | | |
| antibody | | | | | | | | |
| IL-15+ IL-36γ + | 1337 | 1 | 39746 | 4726 | 1767 | 381 | 7416 | 600 |
| anti-4-1BB | | | | | | | | |
| agonistic | | | | | | | | |
| antibody | | | | | | | | |
| IL-21 + IL-36γ + | 228 | 42 | 21012 | 2668 | 142 | 22 | 1485 | 153 |
| anti-4-1BB | | | | | | | | |
| agonistic | | | | | | | | |
| antibody | | | | | | | | |

SEM = Standard Error of the Mean

Expression of CD25 on CD4⁺ and CD8⁺ T-Cells Following
Treatment with Various Combinations of Human Cytokines
and/or an Anti-Human 4-1BB Agonistic Antibody

| | | | CD8⁺ T-Cells | |
|---|---|---|---|---|
| | CD4⁺ T-Cells | | | CD25 |
| | | % CD25 | | Expression, |
| | % CD25 | Expression, | % CD25 | with CD3ε |
| | Expression, | with CD3ε | Expression, | Stimulation |
| Treatments | Unstimulated | Stimulation | Unstimulated | (MFI*) |
| No cytokine (untreated | 2 | 37 | 1 | 8356 |
| control) | | | | |
| IL-12p70 | 2 | 43 | 2 | 17025 |
| IL-15 | 13 | 78 | 16 | 21442 |
| IL-21 | 2 | 41 | 2 | 8842 |
| IL-36γ | 3 | 37 | 1 | 7641 |
| Anti-4-1BB agonistic antibody | 2 | 37 | 1 | 9331 |
| IL-12p70 + IL-15 | 18 | 83 | 25 | 24511 |
| IL-12p70 + IL-21 | 3 | 53 | 3 | 17009 |
| IL-12p70 + IL-36γ | 2 | 49 | 2 | 15348 |
| IL-12p70 + anti-4-1BB | 2 | 43 | 2 | 15420 |
| agonistic antibody | | | | |
| IL-15 + IL-21 | 14 | 83 | 22 | 22054 |
| IL-15 + IL-36γ | 14 | 75 | 23 | 20800 |
| IL-15 + anti-4-1BB | 13 | 76 | 19 | 20008 |
| agonistic antibody | | | | |
| IL-21 + IL-36γ | 3 | 43 | 2 | 8619 |
| IL-21 + anti-4-1BB | 2 | 41 | 2 | 8284 |
| agonistic antibody | | | | |
| IL-36γ + anti-4-1BB | 2 | 40 | 1 | 8551 |
| agonistic antibody | | | | |
| IL-12p70 + IL-15 + IL-21 | 18 | 87 | 25 | 23757 |
| IL-12p70 + IL-15 + IL-36γ | 18 | 85 | 26 | 22447 |
| IL-12p70 + IL-15 + | 19 | 83 | 29 | 22262 |
| anti-4-1BB agonistic antibody | | | | |
| IL-12p70 + IL-21 + IL-36γ | 3 | 54 | 2 | 15683 |
| IL-12p70 + IL-21 + | 2 | 54 | 2 | 16589 |
| anti-4-1BB agonistic antibody | | | | |
| IL-12p70 + IL-36γ + | 2 | 49 | 1 | 15660 |
| anti-4-1BB agonistic antibody | | | | |
| IL-15 + IL-21 + IL-36γ | 14 | 86 | 24 | 21383 |
| IL-15 + IL-21 + | 14 | 81 | 23 | 22358 |
| anti-4-1BB agonistic antibody | | | | |
| IL-15 + IL-36γ + | 12 | 73 | 16 | 19611 |
| anti-4-1BB agonistic antibody | | | | |
| IL-21 + IL-36γ + | 2 | 42 | 1 | 7297 |
| anti-4-1BB agonistic antibody | | | | |

SEM = Standard Error of the Mean
*MFI values provided because the % of CD25 expression with CD3ε stimulation was above 90% for all groups.

[1283] The ability of the immunomodulatory payloads to increase the activation of human antigen-experienced CD8⁺ T-cells was assessed. Human monocyte-derived dendritic cells (ModDCs) were generated and transfected with plasmids encoding secreted NanoLuc®; human STING with the replacements N154S/R284G (STING N154S/R284G; SEQ ID NO:398); human STING with the replacements N154S/R284G and with a replacement of the C-terminal tail (CTT) of human STING with the CTT of Tasmanian devil STING (STING N154S/R284G tazCTT; SEQ ID NO:397); or IL-12p70. Five hours post-transfection, the human dendritic cells were pulsed with HIV-1 (negative control), CEF, or CMV MHC-I restricted peptides, to stimulate antigen-specific CD8⁺ T-cells with a broad array of viral peptides. Human CD8⁺ T-cells were isolated from the same donor and were co-cultured with the pulsed dendritic cells for 48 hours. After 48 hours of co-culture, the supernatants were harvested, and the levels of secreted IFN-γ were measured in the cell culture supernatants using a CBA kit (BioLegend).

[1284] The results, summarized in the table below, demonstrate the potent effect of IL-12p70, as well as the STING variants with the N154S and R284G GOF mutations, with or without replacement of the human STING CTT with the Tasmanian devil STING CTT, in increasing the antigen-specific activation of human CD8⁺ T-cells, measured in terms of IFN-γ secretion from the T-cells.

Antigen-Specific Activation of Human CD8⁺ T-Cells
Following Treatment with Immunomodulatory Proteins

| | IFN-γ Secretion (pg/ml) | | | | | |
|---|---|---|---|---|---|---|
| | HIV Peptide | | CEF Peptide | | CMV Peptide | |
| | Stimulation | | Stimulation | | Stimulation | |
| Treatments | Mean | SEM | Mean | SEM | Mean | SEM |
| Untransfected control | 7 | 1 | 904 | 126 | 61 | 23 |
| Secreted NanoLuc ® | 352 | 7 | 3287 | 632 | 577 | 85 |
| STING N154S/R284G | 1122 | 95 | 7226 | 393 | 1579 | 201 |
| STING N154S/R284G | 952 | 21 | 6178 | 640 | 1724 | 547 |
| tazCTT | | | | | | |
| IL-12p70 #1 | 841 | 10 | 5678 | 232 | 1404 | 231 |
| IL-12p70 #2 | 846 | 32 | 4815 | 110 | 1328 | 3 |

SEM = Standard Error of the Mean

### Example 27

### Plasmid Transfer Following Immunostimulatory Bacterial Cell Death Enables Durable Protein Production in Human Primary M2 Macrophages

[1285] The relative efficiencies of transfection (i.e., direct transfer of plasmid DNA) vs. bactofection (i.e., transfer of plasmid DNA by infection with the immunostimulatory bacterial strains herein), in primary human M2 macrophages, for expression of a reporter gene, were compared. The transfer of plasmids encoding gene expression cassettes from strain YS1646Δasd/ΔFLG/ΔpagP/ΔansB/ΔcsgD, upon bacterial infection, to immunosuppressive phagocytic cells (i.e., bactofection), was assessed. Human M2 macrophages were generated from healthy human donors, and then infected with a strain of YS1646Δasd/ΔFLG/ΔpagP/ΔansB/ΔcsgD encoding a NanoLuciferase® (NanoLuc®, Promega) reporter gene. Transfection (i.e., direct transfer of plasmid DNA) experiments also were performed as a control, and used to determine the efficiency of gene expression in comparison to bactofection (i.e., transfer of plasmid DNA by the immunostimulatory bacterial strains herein).

[1286] Human M2 macrophages were generated from negatively isolated human monocytes using ImmunoCult™-SF Macrophage Medium (StemCell Technologies). Monocytes (5×10⁵ cells per well) were seeded in a 24-well plate, with a final volume of 500 μL containing 100 ng/ml of human macrophage colony-stimulating factor (M-CSF). Three days later, 500 μL of ImmunoCult™-SF Macrophage Medium, containing 200 ng/mL of human M-CSF+20 ng/mL of human IL-4+20 ng/mL of human IL-10, was added per well, and the cells were incubated for three more days. On day 6, M2 macrophages were infected, at an MOI of 150, with strain YS1646Δasd/ΔFLG/ΔpagP/ΔansB/ΔcsgD containing a plasmid encoding secreted NanoLuc® (secNanoLuc®) under control of a CMV promoter (referred to herein as strain YS1646Δasd/ΔFLG/ΔpagP/ΔansB/ΔcsgD-NanoLuc®). Cell culture supernatants were harvested every 24 hours for a period of five days, and the levels of secreted NanoLuc® were measured using a Luciferase Assay Detection Kit (Promega).

[1287] The results are summarized in the table below. As shown in the table below, the amount of secreted NanoLuc®, measured in terms of relative light units (RLUs) detected from the luciferase activity assay, increased at every time point measured, from 24 hours, until 120 hours, for the infected M2 macrophages, compared to the uninfected M2 macrophages (control, which gave a background luminescence of 60.0 RLUs). The NanoLuc® signals significantly increased with time, indicating an efficient delivery of plasmid DNA and a sustained expression of mRNA encoding protein, over a period of several days, upon infection of M2 macrophages with strain YS1646Δasd/ΔFLG/ΔpagP/ΔansB/ΔcsgD-NanoLuc®. These data demonstrate efficient plasmid transfer from the bacteria to the M2 macrophages, upon bacterial infection, and following bacterial cell death inside the M2 macrophages.

Protein Secretion Following Infection of M2
Macrophages with Immunostimulatory Bacteria
Containing Plasmid Encoding Reporter Gene

| | | Luciferase |
|---|---|---|
| | Time Post- | Activity |
| Treatments (Infections) | Infection | (RLUs) |
| Uninfected M2 Macrophages (control) | 24 hours | 60.0 |
| YS1646Δasd/ΔFLG/ΔpagP/ΔansB/ | 24 hours | 63.7 |
| ΔcsgD-NanoLuc ® (infection) | | |
| YS1646Δasd/ΔFLG/ΔpagP/ΔansB/ | 48 hours | 193.2 |
| ΔcsgD-NanoLuc ® (infection) | | |
| YS1646Δasd/ΔFLG/ΔpagP/ΔansB/ | 72 hours | 308.2 |
| ΔcsgD-NanoLuc ® (infection) | | |
| YS1646Δasd/ΔFLG/ΔpagP/ΔansB/ | 96 hours | 415.7 |
| ΔcsgD-NanoLuc ® (infection) | | |
| YS1646Δasd/ΔFLG/ΔpagP/ΔansB/ | 120 hours | 515.2 |
| ΔcsgD-NanoLuc ® (infection) | | |

[1288] In a parallel experiment, M2 macrophages were transfected with 1 μg of the same secNanoLuc® expression plasmid, using Viromer® RED mRNA and plasmid DNA transfection reagent (OriGene), or were infected with strain YS1646Δasd/ΔFLG/ΔpagP/ΔansB/ΔcsgD-NanoLuc®, as described above. Every 24 hours for a period of five days, and for every time point, the infected and transfected M2 macrophages were lysed with RNA Lysis Buffer (Zymo Research), and RNA extraction was performed using the Zymo Research Quick-RNA™ 96 Kit, according to the manufacturer's protocol. Synthesis of cDNA was performed from template RNA using the iScript™ Reverse Transcription Supermix for RT-qPCR (Bio-Rad) in a 20 μL reaction, according to the manufacturer's instructions. qPCR for the NanoLuc® was performed with a CFX96™ Real-Time PCR Detection System (Bio-Rad) using the iQ™ Multiplex Powermix (Bio-Rad). The standard thermocycling program on the Bio-Rad CFX96™ Real-Time PCR Detection System consisted of a 95° C. denaturation for 150 seconds, followed by 39 cycles of 95° C. for 15 seconds and 60° C. for 55 seconds. All samples were run in triplicates, and the mean C_{q} values were calculated. Quantification of the NanoLuc® mRNA was normalized using actin reference mRNA (Bio-Rad, assay ID: qHsaCEP0036280). ΔC_{q} was calculated as the difference between the target (i.e., NanoLuc®) and reference gene (i.e., actin). ΔΔC_{q} was obtained by normalizing the ΔC_{q} values of the YS1646Δasd/ΔFLG/ΔpagP/ΔansB/ΔcsgD-NanoLuc® infected M2 macrophages, and the M2 macrophages transfected with the plasmid encoding NanoLuc®, to the average ΔC_{q} value of the untransfected control group. NanoLuc® expression in transfected M2 macrophages was normalized to a value of 1.0, based on the average ΔC_{q} values, and the fold increase in NanoLuc® expression from infected M2 macrophages (i.e., bactofection), relative to NanoLuc® expression from transfected M2 macrophages, was calculated as 2\hat{ }-ΔΔC_{q}.

[1289] The results are summarized in the table below, which shows that a higher level of NanoLuc® expression was detected by RT-qPCR at 24 hours, in the M2 macrophages infected with strain YS1646Δasd/ΔFLG/ΔpagP/ΔansB/ΔcsgD-NanoLuc®, compared to the level of NanoLuc® expression in the M2 macrophages transfected with the plasmid encoding NanoLuc®. This indicates a higher degree of plasmid delivery upon infection of M2 macrophages with the immunostimulatory bacteria, as compared to direct transfection of the cells with plasmid DNA.

Gene Expression Levels Following Bactofection
or Transfection of M2 Macrophages

| | | NanoLuc ® mRNA | |
|---|---|---|---|
| | | Expression from | |
| | | Infected Cells | |
| | | Relative to mRNA | |
| | | from Transfected | |
| | Time | Cells (Mean Fold | |
| | Post- | Increase) | |
| Treatments to M2 Macrophages | Infection | Mean | SEM |
| Transfection with Plasmid Encoding NanoLuc ® | 24 hours | 1 | — |
| Infection with | 24 hours | 4.8 | 0.4 |
| YS1646Δasd/ΔFLG/ΔpagP/ΔansB/ΔcsgD- | | | |
| NanoLuc ® | | | |
| Infection with | 48 hours | 4.9 | 0.3 |
| YS1646Δasd/ΔFLG/ΔpagP/ΔansB/ΔcsgD- | | | |
| NanoLuc ® | | | |
| Infection with | 72 hours | 4.4 | 0.3 |
| YS1646Δasd/ΔFLG/ΔpagP/ΔansB/ΔcsgD- | | | |
| NanoLuc ® | | | |
| Infection with | 96 hours | 4.3 | 0.4 |
| YS1646Δasd/ΔFLG/ΔpagP/ΔansB/ΔcsgD- | | | |
| NanoLuc ® | | | |
| Infection with | 120 hours | 4.8 | 0.4 |
| YS1646Δasd/ΔFLG/ΔpagP/ΔansB/ΔcsgD- | | | |
| NanoLuc ® | | | |

SEM = Standard Error of Mean

### Example 28

### Positioning of Encoding Nucleic Acids, in Plasmids Encoding A Plurality of Heterologous Products, Can Enhance the Production of Detectable Protein in Human Cells

[1290] This example shows that the expression of a plurality of therapeutic products, encoded on plasmids in the immunostimulatory bacteria provided herein, can be improved by virtue of the position of the nucleic acid molecule encoding one product, relative to the positions of nucleic acid molecules encoding other products. To demonstrate this, and to identify a position for each gene that encodes a particular product (payload) in the expression cassette on the combination plasmids that results in the highest level of protein expression in target cells, various combinations of cytokines and other immunostimulatory proteins were cloned into a plasmid containing one or more eukaryotic promoters. The plasmids contained two separate open reading frames (ORFs), each under the control of a different promoter, an EF-1α promoter and a CMV promoter (i.e., a dual promoter system), or contained 2A peptides (e.g., T2A and/or P2A) within one ORF, and one promoter to drive the expression of two or more genes (i.e., a single promoter system). The plasmids were transfected into HEK293T cells, and the expression levels for the various encoded products (payloads) in the cell culture supernatants were determined.

[1291] The payloads encoded on the combination plasmids include, but are not limited to, for example, murine STING with the GOF (gain-of-function) mutation C205Y (muSTING C205Y); human STING with the GOF mutation R284G and with a replacement of the human STING C-terminal tail (CTT) with the Tasmanian devil STING CTT (huSTING R284G tazCTT); human STING with the GOF mutations N154S and R284G and with a replacement of the human STING CTT with the Tasmanian devil STING CTT (huSTING N154S/R284G tazCTT); human STING with the GOF mutations N154S and R284G (huSTING N154S/R284G); murine IL-12p70 (muIL-12p70); murine IL-15Rα-IL-15sc (muIL-15Rα-IL-15sc); murine IL-21 (muIL-21); murine IL-18 (muIL-18); murine CXCL10 (muCXCL10); anti-murine CTLA-4 scFv (anti-muCTLA-4 scFv; SEQ ID NO:404); anti-murine CTLA-4 scFv-Fc (anti-muCTLA-4 scFv-Fc; SEQ ID NO:405); murine 4-1BBLΔCyt (mu4-1BBLΔCyt, where ΔCyt indicates a deletion of the cytoplasmic domain); murine soluble TGFβ receptor II fused with a mouse IgG2a Fc (mu sTGFβRII-Fc; SEQ ID NO:406); human soluble TGFβ receptor II fused with a human IgG1 Fc (hu sTGFβRII-Fc; SEQ ID NO:407); murine IFN-alpha2 (muIFN-α2); murine IFN-beta (muIFN-β); murine IL-36 gamma (muIL-36γ); murine IL-23 (muIL-23); murine OX40L (muOX40L); and various combinations of two or more thereof. The sequences were confirmed by Sanger sequencing.

[1292] The anti-murine CTLA-4 scFv (SEQ ID NO:404) anti-murine CTLA-4 scFv-Fc (SEQ ID NO:405) were derived from the 9D9 clone. The scFv contains an IgK leader mouse sequence, and the V_{L} and V_{H} domains from clone 9D9, linked via a (Gly₄Ser)₃ linker. The scFv-Fc also contains a mouse IgG2a Fc linked to the V_{H} domain.

[1293] HEK293T STING Null Cells (293-Dual™ Null Cells; InvivoGen), which do not contain endogenous STING, and express secreted embryonic alkaline phosphatase (SEAP), placed under the control of the endogenous IFN-stimulated response element (ISRE) promoter, where the coding sequence of ISRE is replaced by the SEAP ORF using knock-in technology, were used. HEK293T STING Null cells (293-Dual™ Null Cells; InvivoGen) were seeded in 24-well plates coated with poly-L-lysine at 200,000 cells per well, and incubated overnight at 37° C. in a 5% CO₂ incubator, to achieve 80% confluency. The following day, 500 ng of each plasmid DNA was diluted in serum-free media and added to FuGENE® transfection reagent (Promega), at the proper reagent:DNA ratios, with untransfected wells serving as negative controls (in duplicates). Cell culture supernatants from each sample were collected 48 hours post-transfection.

[1294] STING activity of each of the encoded STING variants (muSTING C205Y, huSTING N154S/R284G, huSTING R284G tazCTT, and huSTING N154 S/R284G tazCTT) was evaluated with the HEK 293T STING Null ISRE-SEAP reporter cell line (293-Dual™ Null Cells; InvivoGen). Using these cells, the type I interferon (IFN) activity (induced by STING) is assessed by monitoring type I IFN-stimulated SEAP production in the cell supernatants. 20 μL of cell culture supernatant was added to 180 of QUANTI-Blue™ reagent (InvivoGen), which is used for measuring SEAP. Type I interferon activation was determined by measuring ISRE-induced SEAP activity on a SpectraMax® M3 Spectrophotometer (Molecular Devices), at an absorbance of 650 nm.

[1295] Cell culture supernatants also were assessed for the expression of encoded cytokines by using ELISAs specific for each cytokine. For the muIL-15Rα-IL-15sc constructs, the murine IL-15Rα-IL-15sc ELISA (Thermo Fisher Scientific) was used, per kit instructions. ELISAs specific for murine IL-18 (Invitrogen), murine IL-21 (Invitrogen), murine IL-12p70 (BioLegend), murine IL-23 (BioLegend), murine CXCL10 (BioLegend), and murine IL-36γ (RayBiotech), were used to measure the levels of each of these cytokines in the cell culture supernatants. Murine IFN-α2 and murine IFN-β were measured using the appropriate U-PLEX Assays (Meso Scale Discovery).

[1296] Direct ELISAs with mouse TGF-β1 or human TGF-β1 (R&D Systems) were performed on the cell culture supernatants of HEK293T cells transfected with plasmids encoding the murine or human soluble TGFβ receptor II fusions with Fc, respectively, to measure the expression levels of these proteins. Direct ELISAs with mouse CTLA-4-Fc (R&D Systems) were performed on the cell culture supernatants of cells transfected with plasmids encoding anti-murine CTLA-4 scFv and anti-murine CTLA-4 scFv-Fc, to measure the expression levels of these proteins.

[1297] The expression of the murine cell surface ligands 4-1BBLΔcyt and OX40L was assessed by flow cytometry, 48 hours post-transfection. For the cells transfected with the plasmids encoding mu4-1BBLΔcyt, the cells were washed twice with PBS+2% FBS by centrifugation at 1300 RPM for 3 minutes. The cells then were resuspended in PBS+2% FBS, and stained with biotin-conjugated anti-murine 4-1BBL antibody (clone TKS-1, BioLegend). After incubation for 30 minutes, the cells were washed twice with PBS+2% FBS by centrifugation at 1300 RPM for 3 minutes, resuspended in PBS+2% FBS, and stained with APC-conjugated streptavidin (BioLegend). After incubation for 30 minutes, the cells were washed twice with PBS+2% FBS by centrifugation at 1300 RPM for 3 minutes, and resuspended in PBS+2% FBS with DAPI (dead/live stain). Flow cytometry data were acquired using the ACEA NovoCyte® flow cytometer (ACEA Biosciences, Inc.) and analyzed using the FlowJo™ software (Tree Star, Inc.).

[1298] Alternatively, cells expressing muOX40L were washed twice with PBS+2% FBS by centrifugation at 1300 RPM for 3 minutes. The cells were then resuspended in PBS+2% FBS, and stained with APC-conjugated anti-mouse OX40L antibody (clone RM134L, BioLegend). After incubation for 30 minutes, the cells were washed twice with PBS+2% FBS by centrifugation at 1300 RPM for 3 minutes, and resuspended in PBS+2% FBS with DAPI (dead/live stain). Flow cytometry data were acquired using the ACEA NovoCyte® flow cytometer (ACEA Biosciences, Inc.) and analyzed using the FlowJo™ software (Tree Star, Inc.).

[1299] The expression of individual payloads in the combination plasmids are summarized in the table below, using the symbols −, +, ++, and +++ to indicate expression levels. − denotes no expression; + denotes some expression; ++ denotes good expression; and +++ denotes high expression. The symbol +/− denotes expression levels between + and −, i.e., low expression; +/++ denotes expression levels between + and ++, i.e., moderate expression; and ++/+++ denotes expression levels between ++ and +++ expression, i.e., high expression.

[1300] For the single promoter systems, in which the plasmid encodes two or more payloads under the control of a single CMV promoter, with a 2A peptide (T2A or P2A) encoded between each pair of genes or ORFs, X_T2A denotes that the payload being assessed (i.e., “X”) is encoded before the T2A peptide on a plasmid with a CMV promoter; T2A_X denotes that the payload being assessed is encoded after the T2A peptide on a plasmid with a CMV promoter; P2A_X denotes that the payload being assessed is encoded after the P2A peptide on a plasmid with a CMV promoter; and P2A_X_T2A_X*, where X* is the payload being assessed, denotes that the payload being assessed is encoded after the T2A peptide that is encoded after the P2A peptide and the payload (X) following the P2A polypeptide, on a plasmid with a CMV promoter.

[1301] For the single promoter systems, in which the plasmid encodes two or more payloads under the control of a single EF-1α promoter, with a 2A peptide (T2A or P2A) encoded between each pair of genes or ORFs, X^{#}_T2A and T2A_X^{#}, where X^{#} is the payload that is assessed, denote that the payload is expressed before or after the T2A peptide, respectively, on a plasmid with an EF-1α promoter. For example, in a plasmid encoding CMV mu4-1BBLΔcyt_T2A_muIL-12p70 P2A mu sTGFβRII-Fc_T2A_huSTING N154S/R284G tazCTT, X_T2A represents mu4-1BBLΔcyt; T2A_X represents muIL-12p70; P2A_X represents mu sTGFβRII-Fc; and P2A_X_T2A_X* represents huSTING N154S/R284G tazCTT. Similarly, in a plasmid encoding CMV muIL-12p70_T2A_muIL-21+EF-1α mu4-1BBLΔcyt_T2A_muSTING C205Y, X_T2A represents muIL-12p70; T2A_X represents muIL-21; X^{#} T2A represents mu4-1BBLΔcyt; and T2A_X^{#} represents muSTING C205Y.

[1302] For the plasmids encoding each payload under the control of a separate promoter (or only one payload with one promoter; i.e., single expressors), CMV_X and EF-1α X^{#} denote that the payload being assessed is encoded after a CMV promoter (payload X), or after an EF-1α promoter (payload X^{#}), respectively. As shown in the table below, single expressors generally show the highest expression levels. Expression tends to decrease for each payload as more proteins are encoded on the plasmid, whether it is a dual promoter plasmid, or a single promoter plasmid. Expression of the payload located in the first position of a combination plasmid (e.g., before the first T2A), generally was higher than expression of the same payload in other positions on the plasmid. In combination plasmids containing more than one payload, higher expression was often seen in the first position after the CMV promoter. Murine 4-1BBLΔCyt was found to only express well when encoded in the first position, after the CMV promoter, in combination plasmids.

Expression Levels of Single and Combination Payloads

| | CMV Promoter | | | | EF-1α Promoter | | Single Expressors | |
|---|---|---|---|---|---|---|---|---|
| Encoded Payloads | X_T2A | T2A_X | P2A_X | P2A_X_T2A_X* | X^{#}_T2A | T2A_X^{#} | CMV_X | EF-1α_X^{#} |
| CMV muSTING C205Y | | | | | | | + | |
| WPRE SV40pA | | | | | | | | |
| CMV muSTING C205Y | | | | | | | + | |
| HPRE bGHpA | | | | | | | | |
| EF-1α muSTING C205Y | | | | | | | | +++ |
| WPRE SV40pA | | | | | | | | |
| CMV huSTING R284G | | | | | | | +++ | |
| tazCTT HPRE bGHpA | | | | | | | | |
| CMV huSTING | | | | | | | +++ | |
| N154S/R284G HPRE | | | | | | | | |
| bGHpA | | | | | | | | |
| CMV huSTING | | | | | | | +++ | |
| N154S/R284G tazCTT | | | | | | | | |
| HPRE bGHpA | | | | | | | | |
| CMV muIL-12p70 WPRE | | | | | | | +++ | |
| SV40pA | | | | | | | | |
| CMV muIL-12p70 HPRE | | | | | | | +++ | |
| bGHpA | | | | | | | | |
| CMV muIL-15Rα-IL-15sc | | | | | | | ++ | |
| HPRE bGHpA | | | | | | | | |
| CMV muIL-21 HPRE | | | | | | | ++ | |
| bGHpA | | | | | | | | |
| CMV muIL-18 HPRE | | | | | | | +++ | |
| bGHpA | | | | | | | | |
| EF-1α muCXCL10 WPRE | | | | | | | | +++ |
| SV40pA | | | | | | | | |
| CMV anti-muCTLA-4 scFv | | | | | | | +++ | |
| WPRE SV40pA | | | | | | | | |
| EF-1α anti-muCTLA-4 scFv | | | | | | | | +++ |
| WPRE SV40pA | | | | | | | | |
| CMV anti-muCTLA-4 scFv | | | | | | | +++ | |
| HPRE bGHpA | | | | | | | | |
| CMV anti-muCTLA-4 | | | | | | | +++ | |
| scFv-Fc WPRE-SV40pA | | | | | | | | |
| EF-1α mu4-1BBLΔCyt | | | | | | | | +++ |
| WPRE SV40pA | | | | | | | | |
| CMV mu4-1BBLΔCyt | | | | | | | ++ | |
| HPRE bGHpA | | | | | | | | |
| CMV mu sTGFβRII-Fc | | | | | | | +++ | |
| WPRE SV40pA | | | | | | | | |
| CMV mu sTGFβRII-Fc | | | | | | | +++ | |
| HPRE bGHpA | | | | | | | | |
| CMV hu sTGFβRII-Fc | | | | | | | +++ | |
| HPRE bGHpA | | | | | | | | |
| CMV muIFN-α2 HPRE | | | | | | | +++ | |
| bGHpA | | | | | | | | |
| CMV muIFN-β HPRE | | | | | | | +++ | |
| bGHpA | | | | | | | | |
| CMV muIL-36γ HPRE | | | | | | | +++ | |
| bGHpA | | | | | | | | |
| CMV muIL-23 HPRE | | | | | | | +++ | |
| bGHpA | | | | | | | | |
| CMV muOX40L HPRE | | | | | | | +++ | |
| bGHpA | | | | | | | | |
| CMV muIL-12p70 HPRE | | | | | | | +++ | ++ |
| bGHpA + EF-1α muSTING | | | | | | | | |
| C205Y WPRE SV40pA | | | | | | | | |
| CMV muSTING C205Y | | | | | | | + | + |
| HPRE bGHpA + EF-1α | | | | | | | | |
| muIL-12p70 WPRE | | | | | | | | |
| SV40pA | | | | | | | | |
| CMV muIL-12p70 HPRE | | | | | | | +++ | ++ |
| bGHpA + EF-1α | | | | | | | | |
| muCXCL10 WPRE | | | | | | | | |
| SV40pA | | | | | | | | |
| CMV muIL- | ++ | +++ | | | | | | +++ |
| 12p70_T2A_muIL-15Rα- | | | | | | | | |
| IL-15sc HPRE bGHpA + | | | | | | | | |
| EF-1α muSTING C205Y | | | | | | | | |
| WPRE SV40pA | | | | | | | | |
| CMV muIL- | ++ | ++ | | | | | | +++ |
| 12p70_T2A_muIL-18 | | | | | | | | |
| HPRE bGHpA + EF-1α | | | | | | | | |
| muSTING C205Y WPRE | | | | | | | | |
| SV40pA | | | | | | | | |
| CMV muIL- | + | ++ | | | | | | +++ |
| 12p70_T2A_muIL-21 | | | | | | | | |
| HPRE bGHpA + EF-1α | | | | | | | | |
| muSTING C205Y WPRE | | | | | | | | |
| SV40pA | | | | | | | | |
| CMV muIL- | ++ | ++ | | | | | | ++ |
| 12p70_T2A_muIL-18 | | | | | | | | |
| HPRE bGHpA + EF-1α | | | | | | | | |
| muCXCL10 WPRE | | | | | | | | |
| SV40pA | | | | | | | | |
| CMV muIL- | ++ | ++ | | | | | | ++ |
| 12p70_T2A_muIL-21 | | | | | | | | |
| HPRE bGHpA + EF-1α | | | | | | | | |
| muCXCL10 WPRE | | | | | | | | |
| SV40pA | | | | | | | | |
| CMV muIL- | ++ | +++ | | | | | | ++ |
| 12p70_T2A_muIL- | | | | | | | | |
| 15Rα-IL-15sc HPRE | | | | | | | | |
| bGHpA + EF-1α | | | | | | | | |
| muCXCL10 WPRE | | | | | | | | |
| SV40pA | | | | | | | | |
| CMV muIL- | ++ | ++ | | | | | | + |
| 12p70_T2A_muSTING | | | | | | | | |
| C205Y HPRE bGHpA + | | | | | | | | |
| EF-1α muIL-18 WPRE | | | | | | | | |
| SV40pA | | | | | | | | |
| CMV muIL- | + | + | | | | | | + |
| 12p70_T2A_muSTING | | | | | | | | |
| C205Y HPRE bGHpA + | | | | | | | | |
| EF-1α anti-muCTLA-4 scFv | | | | | | | | |
| WPRE SV40pA | | | | | | | | |
| CMV muIL- | +++ | ++ | | | | | | ++ |
| 12p70_T2A_muSTING | | | | | | | | |
| C205Y HPRE bGHpA + | | | | | | | | |
| EF-1α mu4-1BBLΔCyt | | | | | | | | |
| WPRE SV40pA | | | | | | | | |
| CMV muIL- | ++ | + | | | | | | + |
| 12p70_T2A_mu4- | | | | | | | | |
| 1BBLΔCyt HPRE | | | | | | | | |
| bGHpA + EF-1α muSTING | | | | | | | | |
| C205Y WPRE SV40pA | | | | | | | | |
| CMV muIL- | ++ | +++ | | | +/− | + | | |
| 12p70_T2A_muIL- | | | | | | | | |
| 15Rα-IL-15sc HPRE | | | | | | | | |
| bGHpA + EF-1α mu4- | | | | | | | | |
| 1BBLΔCyt_T2A_muSTING | | | | | | | | |
| C205Y WPRE SV40pA | | | | | | | | |
| CMV muIL- | + | + | | | +/− | + | | |
| 12p70_T2A_muIL-21 | | | | | | | | |
| HPRE bGHpA + EF-1α | | | | | | | | |
| mu4- | | | | | | | | |
| 1BBLΔCyt_T2A_muSTING | | | | | | | | |
| C205Y WPRE SV40pA | | | | | | | | |
| CMV muIL- | + | + | | | +/− | +/− | | |
| 12p70_T2A_muSTING | | | | | | | | |
| C205Y HPRE bGHpA + | | | | | | | | |
| EF-1α anti-muCTLA-4 | | | | | | | | |
| scFv_T2A_mu4- | | | | | | | | |
| 1BBLΔCyt WPRE SV40pA | | | | | | | | |
| CMV muIL-12p70_T2A_muIL- | + | ++ | | | +/− | ++ | | |
| 15Rα-IL-15sc HPRE | | | | | | | | |
| bGHpA + EF-1α anti- | | | | | | | | |
| muCTLA-4 | | | | | | | | |
| scFv_T2A_muSTING | | | | | | | | |
| C205Y WPRE SV40pA | | | | | | | | |
| CMV muIL- | + | + | | | +/− | + | | |
| 12p70_T2A_muIL-18 | | | | | | | | |
| HPRE bGHpA + EF-1α | | | | | | | | |
| anti-muCTLA-4 | | | | | | | | |
| scFv_T2A_muSTING | | | | | | | | |
| C205Y WPRE SV40pA | | | | | | | | |
| CMV muIL- | + | + | | | +/− | + | | |
| 12p70_T2A_muIL-21 | | | | | | | | |
| HPRE bGHpA + EF-1α | | | | | | | | |
| anti-muCTLA-4 | | | | | | | | |
| scFv_T2A_muSTING | | | | | | | | |
| C205Y WPRE SV40pA | | | | | | | | |
| CMV muIL- | ++ | ++ | | | | | | |
| 12p70_T2A_muSTING | | | | | | | | |
| C205Y WPRE SV40pA | | | | | | | | |
| CMV muIL- | ++ | ++ | | | | | | |
| 12p70_T2A_muSTING | | | | | | | | |
| C205Y HPRE bGHpA | | | | | | | | |
| CMV muIL-12p70_T2A_muIL- | ++ | ++ | | | | | | |
| 15Rα-IL-15sc HPRE bGHpA | | | | | | | | |
| CMV muIL-15Rα-IL- | ++ | ++ | | | | | | |
| 15sc_T2A_muIL-12p70 | | | | | | | | |
| HPRE bGHpA | | | | | | | | |
| CMV muIL- | ++ | ++ | | | | | | |
| 12p70_T2A_muIL-18 | | | | | | | | |
| HPRE bGHpA | | | | | | | | |
| CMV muIL-18_T2A_muIL- | ++ | + | | | | | | |
| 12p70 HPRE bGHpA | | | | | | | | |
| CMV muIL- | ++ | ++ | | | | | | |
| 12p70_T2A_muIL-21 | | | | | | | | |
| HPRE bGHpA | | | | | | | | |
| CMV muIL-21_T2A_muIL- | +++ | ++ | | | | | | |
| 12p70 HPRE bGHpA | | | | | | | | |
| CMV muIL- | + | ++/+++ | | | | | | |
| 12p70_T2A_huSTING | | | | | | | | |
| R284G tazCTT HPRE bGHpA | | | | | | | | |
| CMV mu4- | + | +++ | | | | | | |
| 1BBLΔCyt_T2A_huSTING | | | | | | | | |
| R284G tazCTT HPRE bGHpA | | | | | | | | |
| CMV mu4- | ++ | ++ | | | | | | |
| 1BBLΔCyt_T2A_muIL- | | | | | | | | |
| 12p70 HPRE bGHpA | | | | | | | | |
| CMV anti-muCTLA-4 | + | + | | | | | | |
| scFv_T2A_muIL-12p70 | | | | | | | | |
| HPRE bGHpA | | | | | | | | |
| CMV anti-muCTLA-4 | +/− | ++ | | | | | | |
| scFv_T2A_huSTING | | | | | | | | |
| R284G tazCTT HPRE bGHpA | | | | | | | | |
| CMV anti-muCTLA-4 | +++ | + | | | | | | |
| scFv-Fc_T2A_muIL-12p70 | | | | | | | | |
| HPRE bGHpA | | | | | | | | |
| CMV anti-muCTLA-4 | +++ | ++ | | | | | | |
| scFv-Fc_T2A_huSTING | | | | | | | | |
| R284G tazCTT HPRE bGHpA | | | | | | | | |
| CMV muIFN- | + | ++ | | | | | | |
| α2_T2A_muIL-12p70 | | | | | | | | |
| HPRE bGHpA | | | | | | | | |
| CMV muIFN- | + | +++ | | | | | | |
| α2_T2A_muIL-36γ HPRE | | | | | | | | |
| bGHpA | | | | | | | | |
| CMV muIFN- | + | +++ | | | | | | |
| α2_T2A_muIFN-β HPRE | | | | | | | | |
| bGHpA | | | | | | | | |
| CMV muIFN- | ++ | +++ | | | | | | |
| α2_T2A_huSTING R284G | | | | | | | | |
| tazCTT HPRE bGHpA | | | | | | | | |
| CMV mu4- | +++ | +++ | | | | | | |
| 1BBLΔCyt_T2A_mu | | | | | | | | |
| sTGFβRII-Fc | | | | | | | | |
| HPRE bGHpA | | | | | | | | |
| CMV mu4- | +++ | +++ | | | | | | |
| 1BBLΔCyt_T2A_muIL- | | | | | | | | |
| 15Rα-IL-15sc | | | | | | | | |
| HPRE bGHpA | | | | | | | | |
| CMV mu4- | +++ | ++ | | | | | | |
| 1BBLΔCyt_T2A_muIFN- | | | | | | | | |
| α2 HPRE bGHpA | | | | | | | | |
| CMV mu4- | +++ | +++ | | | | | | |
| 1BBLΔCyt_T2A_muIL- | | | | | | | | |
| 36γ HPRE bGHpA | | | | | | | | |
| CMV muIL-21_T2A_muIL- | +++ | ++ | | | | | | |
| 15Rα-IL-15sc HPRE bGHpA | | | | | | | | |
| CMV muIL- | ++ | ++ | | | | | | |
| 21_T2A_huSTING R284G | | | | | | | | |
| tazCTT HPRE bGHpA | | | | | | | | |
| CMV muIL-15Rα-IL- | ++ | +++ | | | | | | |
| 15sc_T2A_huSTING | | | | | | | | |
| R284G tazCTT HPRE bGHpA | | | | | | | | |
| CMV muIL- | ++ | ++ | | | | | | |
| 36γ_T2A_muIL-12p70 | | | | | | | | |
| HPRE bGHpA | | | | | | | | |
| CMV muIL- | +++ | +++ | | | | | | |
| 36γ_T2A_huSTING R284G | | | | | | | | |
| tazCTT HPRE bGHpA | | | | | | | | |
| CMV muIL-36γ_T2A_muIFN- | ++ | ++ | | | | | | |
| α2 HPRE bGHpA | | | | | | | | |
| CMV muIL-36γ_T2A_muIL- | ++ | +++ | | | | | | |
| 23 HPRE bGHpA | | | | | | | | |
| CMV mu sTDFβRII- | ++ | +++ | | | | | | |
| Fc_T2A_huSTING R284G | | | | | | | | |
| tazCTT HPRE bGHpA | | | | | | | | |
| CMV muIL- | + | +/− | +++ | | | | | |
| 12p70_T2A_anti-muCTLA- | | | | | | | | |
| 4 scFv_P2A_huSTING | | | | | | | | |
| R284G tazCTT HPRE | | | | | | | | |
| bGHpA | | | | | | | | |
| CMV anti-muCTLA-4 | +/− | + | +++ | | | | | |
| scFv_T2A_muIL- | | | | | | | | |
| 12p70_P2A_huSTING | | | | | | | | |
| R284G tazCTT HPRE | | | | | | | | |
| bGHpA | | | | | | | | |
| CMV muIL- | + | ++ | ++ | | | | | |
| 12p70_T2A_anti-muCTLA- | | | | | | | | |
| 4 scFv-Fc_P2A_huSTING | | | | | | | | |
| R284G tazCTT HPRE | | | | | | | | |
| bGHpA | | | | | | | | |
| CMV anti-muCTLA-4 | +++ | + | + | | | | | |
| scFv-Fc_T2A_muIL- | | | | | | | | |
| 12p70_P2A_huSTING | | | | | | | | |
| R284G tazCTT HPRE | | | | | | | | |
| bGHpA | | | | | | | | |
| CMV muIL-21_T2A_muIL- | ++ | + | +++ | | | | | |
| 12p70_P2A_huSTING | | | | | | | | |
| R284G tazCTT HPRE | | | | | | | | |
| bGHpA | | | | | | | | |
| CMV muIL-21_T2A_muIL- | +++ | + | + | | | | | |
| 12p70_P2A_muIFN-α2 | | | | | | | | |
| HPRE bGHpA | | | | | | | | |
| CMV muIL-21_T2A_{—} | ++ | ++ | +++ | | | | | |
| muIL-15Rα-IL- | | | | | | | | |
| 15sc_P2A_huSTING R284G | | | | | | | | |
| tazCTT HPRE bGHpA | | | | | | | | |
| CMV muIL-12p70_T2A_muIL-15Rα- | + | + | ++ | | | | | |
| IL-15sc_P2A_huSTING R284G | | | | | | | | |
| tazCTT HPRE bGHpA | | | | | | | | |
| CMV muIL-12p70_T2A_{—} | + | + | + | | | | | |
| muIL-15Rα-IL- | | | | | | | | |
| 15sc_P2A_muIFN-α2 | | | | | | | | |
| HPRE bGHpA | | | | | | | | |
| CMV muIL- | ++ | + | ++ | | | | | |
| 36γ_T2A_muIL- | | | | | | | | |
| 12p70_P2A_huSTING | | | | | | | | |
| R284G tazCTT HPRE | | | | | | | | |
| bGHpA | | | | | | | | |
| CMV muIL- | ++ | + | ++ | | | | | |
| 36γ_T2A_muIL- | | | | | | | | |
| 12p70_P2A_muOX40L | | | | | | | | |
| HPRE bGHpA | | | | | | | | |
| CMV muIL- | ++ | +++ | ++ | | | | | |
| 36γ_T2A_muIL- | | | | | | | | |
| 23_P2A_muOX40L HPRE | | | | | | | | |
| bGHpA | | | | | | | | |
| CMV muIL- | ++ | +++ | ++ | | | | | |
| 36γ_T2A_muIL- | | | | | | | | |
| 23_P2A_huSTING R284G | | | | | | | | |
| tazCTT HPRE bGHpA | | | | | | | | |
| CMV mu4- | ++ | + | +++ | | | | | |
| 1BBLΔCyt_T2A_muIL- | | | | | | | | |
| 12p70_P2A_huSTING | | | | | | | | |
| R284G tazCTT HPRE | | | | | | | | |
| bGHpA | | | | | | | | |
| CMV mu4- | ++ | + | +++ | | | | | |
| 1BBLΔCyt_T2A_muIL- | | | | | | | | |
| 12p70_P2A_huSTING | | | | | | | | |
| N154S/R284G tazCTT | | | | | | | | |
| HPRE bGHpA | | | | | | | | |
| CMV mu4- | ++ | + | +++ | | | | | |
| 1BBLΔCyt_T2A_muIL- | | | | | | | | |
| 12p70_P2A_huSTING | | | | | | | | |
| N154S/R284G tazCTT | | | | | | | | |
| HPRE bGHpA | | | | | | | | |
| CMV mu4- | +/++ | ++ | ++ | | | | | |
| 1BBLΔCyt_T2A_mu | | | | | | | | |
| sTGFβRII- | | | | | | | | |
| Fc_P2A_huSTING R284G | | | | | | | | |
| tazCTT HPRE bGHpA | | | | | | | | |
| CMV muIL-15Rα-IL- | + | + | +++ | | | | | |
| 15sc_T2A_muIL- | | | | | | | | |
| 12p70_P2A_huSTING | | | | | | | | |
| R284G tazCTT HPRE | | | | | | | | |
| bGHpA | | | | | | | | |
| CMV mu sTGFβRII- | + | + | +++ | | | | | |
| Fc_T2A_muIL- | | | | | | | | |
| 12p70_P2A_huSTING | | | | | | | | |
| R284G tazCTT HPRE | | | | | | | | |
| bGHpA | | | | | | | | |
| CMV mu4- | ++ | ++ | + | +++ | | | | |
| 1BBLΔCyt_T2A_hu | | | | | | | | |
| sTGFβRII-Fc_P2A_muIL- | | | | | | | | |
| 12p70_T2A_huSTING | | | | | | | | |
| N154S/R284G tazCTT | | | | | | | | |
| HPRE bGHpA | | | | | | | | |
| CMV mu4- | ++ | + | ++ | +++ | | | | |
| 1BBLΔCyt_T2A_muIL- | | | | | | | | |
| 12p70_P2A_hu sTGFβRII- | | | | | | | | |
| Fc_T2A_huSTING | | | | | | | | |
| N154S/R284G tazCTT | | | | | | | | |
| HPRE bGHpA | | | | | | | | |

HPRE = Hepatitis B virus Posttranscriptional Regulatory Element;
WPRE = Woodchuck Hepatitis Virus (WHP) Posttranscriptional Regulatory Element;
bGHpA = bovine growth hormone poly A;
SV40pA = simian virus 40 poly A.

### Example 29

### Biodistribution, Clearance, Tumor Colonization, and Ectopic Gene Expression Studies in Strains YS1646Δasd/ΔFLG/ΔpagP/ΔansB/ΔcsgD and YS1646Δasd/ΔFLG/ΔpagP/ΔansB/ΔcsgD/ΔlppAB

[1303] The biodistribution of strains YS1646Δasd/ΔFLG/ΔpagP/ΔansB/ΔcsgD and YS1646Δasd/ΔFLG/ΔpagP/ΔansB/ΔcsgD/ΔlppAB in various tissues in non-tumor bearing mice, including the liver, spleen, heart, lungs, kidney, intestine, muscle, bone marrow, and lymph nodes, and the clearance therefrom, was assessed and compared to the biodistribution and clearance of parental strain YS1646, following systemic administration. The colonization of the strains in tumors was compared to colonization of non-tumor tissues in mice bearing tumors, and the expression of a heterologous gene product, encoded on a plasmid in the bacteria, in tumors vs. non-tumor tissues, also was determined.

[1304] A. The YS1646Δasd/ΔFLG/ΔpagP/ΔansB/ΔcsgD and YS1646Δasd/ΔFLG/ΔpagP/ΔansB/ΔcsgD/ΔlppAB Deletion Strains are Cleared Rapidly from Naïve Mice, and Ectopic Gene Expression in Healthy Tissue is not Observed

[1305] A biodistribution study was performed to compare the bacterial clearance from tissues over time in non-tumor bearing mice, between the parental YS1646 strain, and strains YS1646Δasd/ΔFLG/ΔpagP/ΔansB/ΔcsgD and YS1646Δasd/ΔFLG/ΔpagP/ΔansB/ΔcsgD/ΔlppAB. A luciferase protein was encoded on plasmids in the YS1646Δasd/ΔFLG/ΔpagP/ΔansB/ΔcsgD and YS1646Δasd/ΔFLG/ΔpagP/ΔansB/ΔcsgD/ΔlppAB strains, and expression of the luciferase in tissues also was assessed, in order to determine the levels of ectopic gene expression in healthy, non-tumor tissues, as described below. For this, 6-8 week-old female BALB/c mice (3 mice per group) were IV injected with a single dose of 2×10⁶ CFUs of each bacterial strain, or with PBS vehicle control. At 2 hours, 24 hours, and 30 days post-dosing, the mice were euthanized, and the spleen, liver, heart, lungs, kidney, intestine, muscle, bone marrow, and lymph nodes were harvested. The tissues were homogenized using the GentleMACS™ Octo Dissociator and the M tubes (Miltenyi Biotec) molecule setting in 2 mL of PBS, and homogenates were plated on LB plates to enumerate the number of colony forming units (CFUs) per gram of tissue.

[1306] As shown in the tables below, all three strains demonstrated CFUs in the spleen and liver, and to a lesser extent, in the heart, lungs and kidneys, at 2 hours post-IV dosing. Unlike with the parental YS1646 strain, which continued to demonstrate high CFUs in the spleen and liver at 24 hours post-dosing, significantly lower CFUs were detected in the spleens and livers of the mice treated with the YS1646Δasd/ΔFLG/ΔpagP/ΔansB/ΔcsgD and YS1646Δasd/ΔFLG/ΔpagP/ΔansB/ΔcsgD/ΔlppAB deletion strains. At day 30 post-dosing, strains YS1646Δasd/ΔFLG/ΔpagP/ΔansB/ΔcsgD and YS1646Δasd/ΔFLG/ΔpagP/ΔansB/ΔcsgD/ΔlppAB were cleared from all organs. The parental YS1646 strain, in contrast, demonstrated colonization in many tissues at 24 hours post-doing, including colonization that was detected in the spleen and liver at day 30 post-dosing.

Biodistribution of Strain YS1646 at 2 Hours, 24 Hours,
and 30 Days Post IV-Dosing in Non-Tumor Bearing Mice

| | Time Post-IV Dosing | | | | | |
|---|---|---|---|---|---|---|
| | 2 Hours | | 24 Hours | | 30 Days | |
| | Mean | | Mean | | Mean | |
| Tissue | CFUs | ±SD | CFUs | ±SD | CFUs | ±SD |
| Spleen | 23981 | 6909.2 | 14214 | 2199.9 | 428 | 261.2 |
| Liver | 6914 | 1784.7 | 8881 | 2060.3 | 54 | 27.2 |
| Heart | 1334 | 693.8 | 768 | 264.1 | <LOD | <LOD |
| Lungs | 1821 | 629.4 | 981 | 137.2 | 27 | 27.5 |
| Kidney | 1868 | 595.9 | 668 | 394.0 | <LOD | <LOD |
| Intestine | 88 | 31.3 | 41 | 50.6 | 21 | 1.5 |
| Muscle | 148 | 45.3 | 188 | 31.3 | <LOD | <LOD |
| Bone Marrow | 214 | 194.9 | 834 | 300.0 | <LOD | <LOD |
| Lymph Node | 48 | 11.6 | 14 | 4.7 | <LOD | <LOD |

SD = standard deviation;
LOD = limit of detection

Biodistribution of Strain YS1646Δasd/ΔFLG/ΔpagP/ΔansB/ΔcsgD
at 2 Hours, 24 Hours, and 30 Days Post IV-Dosing in Non-
Tumor Bearing Mice

| | Time Post-IV Dosing | | | | | |
|---|---|---|---|---|---|---|
| | 2 Hours | | 24 Hours | | 30 Days | |
| | Mean | | Mean | | Mean | |
| Tissue | CFUs | ±SD | CFUs | ±SD | CFUs | ±SD |
| Spleen | 19881 | 6322.1 | 621 | 308.4 | 20 | 16.2 |
| Liver | 8154 | 5820.9 | 341 | 396.7 | <LOD | <LOD |
| Heart | 374 | 302.5 | <LOD | <LOD | <LOD | <LOD |
| Lungs | 308 | 111.1 | 101 | 154.2 | <LOD | <LOD |
| Kidney | 68 | 38.7 | <LOD | <LOD | <LOD | <LOD |
| Intestine | 20 | 16.2 | <LOD | <LOD | <LOD | <LOD |
| Muscle | 21 | 15.9 | <LOD | <LOD | <LOD | <LOD |
| Bone Marrow | <LOD | <LOD | <LOD | <LOD | <LOD | <LOD |
| Lymph Node | <LOD | <LOD | <LOD | <LOD | <LOD | <LOD |

SD = Standard deviation;
LOD = limit of detection

Biodistribution of Strain
YS1646Δasd/ΔFLG/ΔpagP/ΔansB/ΔcsgD/ΔlppAB
at 2 Hours, 24 Hours, and 30 Days Post IV-Dosing
in Non-Tumor Bearing Mice

| | Time Post-IV Dosing | | | | | |
|---|---|---|---|---|---|---|
| | 2 Hours | | 24 Hours | | 30 Days | |
| | Mean | | Mean | | Mean | |
| Tissue | CFUs | ±SD | CFUs | ±SD | CFUs | ±SD |
| Spleen | 2247981 | 3768949.6 | 7674 | 2366.3 | 14 | 4.7 |
| Liver | 208648 | 235899.1 | 4768 | 2011.0 | <LOD | <LOD |
| Heart | 701 | 563.8 | 141 | 102.7 | <LOD | <LOD |
| Lungs | 1434 | 812.7 | 301 | 72.7 | <LOD | <LOD |
| Kidney | 794 | 744.5 | 114 | 81.7 | <LOD | <LOD |
| Intestine | 47 | 62.4 | <LOD | <LOD | <LOD | <LOD |
| Muscle | 41 | 16.2 | 34 | 12.1 | <LOD | <LOD |
| Bone | 107 | 91.6 | 61 | 33.9 | <LOD | <LOD |
| Marrow | | | | | | |
| Lymph | <LOD | <LOD | <LOD | <LOD | <LOD | <LOD |
| Node | | | | | | |

SD = Standard deviation;
LOD = limit of detection

[1307] These data demonstrate that the deletion or disruption of gene(s) encoding the flagella, as well as the genes asd, pagP, ansB, csgD, and, optionally, lppAB, results in the faster clearance of the immunostimulatory bacterial strains from healthy, non-tumor tissues, than parental strain YS1646 (VNP20009, which is msbB⁻/purI⁻, and results in the complete clearance of the bacteria from non-tumor tissues within 24 hours to 30 days; whereas strain YS1646 (VNP20009) still can be detected in non-tumor tissues 24 hours post-dosing, and in the liver and spleen at 30 days post-dosing. This indicates that the immunostimulatory bacteria with genome modifications provided herein are safer to administer and are better tolerated than strain VNP20009. Thus, higher doses of the immunostimulatory bacteria provided herein can be administered.

[1308] In order to measure plasmid delivery by the bacteria to the various non-tumor tissues, and the subsequent heterologous gene expression and protein secretion, the activity of a secreted luciferase protein (NanoLuciferase®, Promega, abbreviated as secNanoLuc®), was measured. The IV administered YS1646Δasd/ΔFLG/ΔpagP/ΔansB/ΔcsgD and YS1646Δasd/ΔFLG/ΔpagP/ΔansB/ΔcsgD/ΔlppAB strains each contained a plasmid encoding secNanoLuc®, under the control of the eukaryotic CMV promoter. Following homogenization of the mouse tissues, as described above, the homogenates were spun down at 1300 RPM for 10 minutes, and the supernatant was collected and assayed for luciferase activity using the NanoGlo® detection reagent (Promega), and luminescence was measured using a SpectraMax® M3 Spectrophotometer/Luminometer (Molecular Devices).

[1309] In all tissues, and at all time points, no luciferase activity was detected above background, despite observing CFUs in the spleen and liver at 24 hours post-dosing. These data demonstrate the ability of the YS1646Δasd/ΔFLG/ΔpagP/ΔansB/ΔcsgD and YS1646Δasd/ΔFLG/ΔpagP/ΔansB/ΔcsgD/ΔlppAB deletion strains to rapidly clear from healthy tissues in non-tumor bearing mice, and, unlike the parental YS1646 strain, to not require antibiotics for bacterial clearance at day 30 post-dosing. Importantly, ectopic gene expression was not observed in healthy tissues at any time point.

[1310] B. The YS1646Δasd/ΔFLG/ΔpagP/ΔansB/ΔcsgD and YS1646Δasd/ΔFLG/ΔpagP/ΔansB/ΔcsgD/ΔlppAB Deletion Strains Preferentially Accumulate in Tumor Tissue, and Ectopic Gene Expression is Exclusively Tumor-Specific

[1311] To determine the relative tissue colonization, and tumor-specific gene expression of the secNanoLuc® plasmid-containing deletion strains, as compared to the parental YS1646 strain, a biodistribution study was performed in tumor-bearing mice. For this, 6-8 week-old female BALB/c mice (4 mice per group) were inoculated orthotopically in the 4^{th} mammary fat pad with 4T1 mammary carcinoma cells (2×10⁵ cells in 100 μL PBS). Mice bearing 10-day established flank tumors were IV injected with a single dose of 2×10⁶ CFUs of the YS1646Δasd/ΔFLG/ΔpagP/ΔansB/ΔcsgD strain, or the YS1646Δasd/ΔFLG/ΔpagP/ΔansB/ΔcsgD/ΔlppAB strain, each containing the plasmid encoding secNanoLuc®, or with a single dose of 2×10⁶ CFUs of the parental YS1646 strain. At day 1, day 4, and day 8 post IV-dosing of the bacteria, mice were euthanized, and the tumors, spleen, liver, heart, lungs, kidney, intestine, muscle, bone marrow, and lymph nodes were harvested and processed as described above, to enumerate the number of colony forming units (CFUs), and to measure the average luminescence (in relative light units (RLUs)) per gram of tumor tissue. In addition, mice were bled at these time points and serum was collected, to determine the levels of systemic pro-inflammatory cytokines induced in response to the administration of the different strains of bacteria, as discussed below.

[1312] As shown in the tables below, all three strains demonstrated preferential colonization (as determined by mean CFUs) in tumors, relative to other tissues, at day 1 post-dosing, and demonstrated increasing tumor colonization at day 4 and day 8. Strain YS1646Δasd/ΔFLG/ΔpagP/ΔansB/ΔcsgD demonstrated a faster and higher level of tumor colonization than strain YS1646Δasd/ΔFLG/ΔpagP/ΔansB/ΔcsgD/ΔlppAB. Additionally, for the YS1646Δasd/ΔFLG/ΔpagP/ΔansB/ΔcsgD strain, and, to a greater degree, for the YS1646Δasd/ΔFLG/ΔpagP/ΔansB/ΔcsgD/ΔlppAB strain, very few colonies were observed in tissues other than the tumor, spleen, and liver. In contrast, colonization of the parental YS1646 strain was observed in healthy, non-tumor tissues throughout the mouse, even at day 8 post-dosing.

Biodistribution of Strain YS1646 in Tumors vs. Healthy Tissues
at 1, 4, and 8 Days Post IV-Dosing in Tumor-Bearing Mice

| | Days Post-IV Dosing | | | | | |
|---|---|---|---|---|---|---|
| | Day 1 | | Day 4 | | Day 8 | |
| | Mean | | Mean | | Mean | |
| Tissue | CFUs | ±SD | CFUs | ±SD | CFUs | ±SD |
| Tumor | 30851 | 54138.9 | 12999981 | 7262671 | 58999981 | 11489106.3 |
| Spleen | 7621 | 2683.4 | 85981 | 11981 | 127981 | 14947.6 |
| Liver | 4466 | 2693.3 | 124981 | 73836.7 | 5969981 | 5161208.2 |
| Heart | 246 | 201.3 | 356 | 215.6 | 2096 | 222.9 |
| Lungs | 121 | 9.3 | 2016 | 247.0 | 6081 | 3983.4 |
| Kidney | 106 | 126.7 | 471 | 127.5 | 5951 | 4618.0 |
| Intestine | 131 | 203.0 | 126 | 31.0 | 176 | 145.8 |
| Muscle | <LOD | <LOD | 196 | 163.5 | 21 | 9.5 |
| Bone Marrow | 16 | 0.4 | 131 | 152.9 | 266 | 36.1 |
| Lymph Node | <LOD | <LOD | 86 | 49.5 | 4346 | 947.7 |

SD = Standard deviation;
LOD = limit of detection

Biodistribution of Strain YS1646Δasd/ΔFLG/ΔpagP/ΔansB/ΔcsgD
in Tumors vs. Healthy Tissues at 1, 4, and 8 Days post
IV-Dosing in Tumor-Bearing Mice

| | Days Post-IV Dosing | | | | | |
|---|---|---|---|---|---|---|
| | Day 1 | | Day 4 | | Day 8 | |
| | Mean | | Mean | | Mean | |
| Tissue | CFUs | ±SD | CFUs | ±SD | CFUs | ±SD |
| Tumor | 26374 | 26240.6 | 2940281 | 3402144.3 | 3694981 | 2787829.6 |
| Spleen | 3991 | 1050.0 | 17231 | 5894.5 | 17831 | 2563.6 |
| Liver | 13011 | 3178.9 | 55981 | 16554.1 | 16756 | 5120.0 |
| Heart | 371 | 330.3 | 26 | 11.0 | <LOD | <LOD |
| Lungs | 61 | 40.2 | 816 | 185.2 | 176 | 104.7 |
| Kidney | 71 | 31.3 | 121 | 208.2 | <LOD | <LOD |
| Intestine | 10 | 1.5 | <LOD | <LOD | <LOD | <LOD |
| Muscle | <LOD | <LOD | 170 | 321.5 | 96 | 171.3 |
| Bone Marrow | <LOD | <LOD | 136 | 129.2 | 331 | 145.5 |
| Lymph Node | <LOD | <LOD | 11 | 1.0 | 371 | 428.3 |

SD = Standard deviation;
LOD = limit of detection

Biodistribution of Strain
YS1646Δasd/ΔFLG/ΔpagP/ΔansB/ΔcsgD/ΔlppAB
in Tumors vs. Healthv Tissues at 1, 4, and 8 Days
Post IV-Dosing in Tumor-Bearing Mice

| | Days Post-IV Dosing | | | | | |
|---|---|---|---|---|---|---|
| | Day 1 | | Day 4 | | Day 8 | |
| | Mean | | Mean | | Mean | |
| Tissue | CFUs | ±SD | CFUs | ±SD | CFUs | ±SD |
| Tumor | 4406 | 8433.7 | 295331 | 372484 | 596881 | 406961.5 |
| Spleen | 1926 | 642.6 | 1516 | 330.6 | 2026 | 699.8 |
| Liver | 2241 | 880.9 | 2111 | 213.4 | 2286 | 545.4 |
| Heart | 36 | 22.5 | <LOD | <LOD | <LOD | <LOD |
| Lungs | 146 | 156.7 | 16 | 0.7 | 76 | 92.2 |
| Kidnev | <LOD | <LOD | <LOD | <LOD | <LOD | <LOD |
| Intestine | <LOD | <LOD | <LOD | <LOD | <LOD | <LOD |
| Muscle | <LOD | <LOD | <LOD | <LOD | <LOD | <LOD |
| Bone | <LOD | <LOD | <LOD | <LOD | <LOD | <LOD |
| Marrow | | | | | | |
| Lymph | <LOD | <LOD | <LOD | <LOD | <LOD | <LOD |
| Node | | | | | | |

SD = Standard deviation;
LOD = limit of detection

[1313] To determine the level of heterologous gene expression and protein secretion in the tumors and in the various non-tumor mouse tissues, the activity of the secNanoLuc®, encoded on the plasmids in the bacteria, was measured in the supernatant from the tissue homogenates using a luciferase activity assay, as described above. As shown in the tables below, expression of secNanoLuc® in both strains was confined to the tumor tissue, despite bacterial CFUs being observed in other tissues (as shown above). The RLUs observed in the bone marrow of mice dosed with the YS1646Δasd/ΔFLG/ΔpagP/ΔansB/ΔcsgD/ΔlppAB deletion strain were determined to be from a contamination, and were not observed in a subsequent experiment. The YS1646Δasd/ΔFLG/ΔpagP/ΔansB/ΔcsgD/ΔlppAB deletion strain showed delayed tumor secNanoLuc® expression, as compared to the YS1646Δasd/ΔFLG/ΔpagP/ΔansB/ΔcsgD deletion strain, due to a delay in tumor colonization (as shown in the tables above).

Tumor-Specific Expression of secNanoLuc ® Encoded on Plasmid in
Strain YS1646Δasd/ΔFLG/ΔpagP/ΔansB/ΔcsgD

| | Days Post-Dosing | | | | | |
|---|---|---|---|---|---|---|
| | Day 1 | | Day 4 | | Day 8 | |
| | Mean | | Mean | | Mean | |
| Tissue | RLUs | ±SD | RLUs | ±SD | RLUs | ±SD |
| Tumor | 39 | −5.0 | 7014 | 7606.8 | 29790 | 14706.8 |
| Spleen | <LOD | <LOD | <LOD | <LOD | <LOD | <LOD |
| Liver | <LOD | <LOD | <LOD | <LOD | <LOD | <LOD |
| Heart | <LOD | <LOD | <LOD | <LOD | <LOD | <LOD |
| Lungs | <LOD | <LOD | <LOD | <LOD | <LOD | <LOD |
| Kidney | <LOD | <LOD | <LOD | <LOD | <LOD | <LOD |
| Intestine | <LOD | <LOD | <LOD | <LOD | <LOD | <LOD |
| Muscle | <LOD | <LOD | <LOD | <LOD | <LOD | <LOD |
| Bone Marrow | <LOD | <LOD | <LOD | <LOD | <LOD | <LOD |
| Lymph Node | <LOD | <LOD | <LOD | <LOD | <LOD | <LOD |

SD = Standard deviation;
LOD = limit of detection

Tumor-Specific Expression of secNanoLuc ®
Encoded on Plasmid in Strain
YS1646Δasd/ΔFLG/ΔpagP/ΔansB/ΔcsgD/ΔlppAB

| | Days Post-Dosing | | | | | |
|---|---|---|---|---|---|---|
| | Day 1 | | Day 4 | | Day 8 | |
| | Mean | | Mean | | Mean | |
| Tissue | RLUs | ±SD | RLUs | ±SD | RLUs | ±SD |
| Tumor | <LOD | <LOD | 85 | 80.6 | 5503 | 4465.9 |
| Spleen | <LOD | <LOD | <LOD | <LOD | <LOD | <LOD |
| Liver | <LOD | <LOD | <LOD | <LOD | <LOD | <LOD |
| Heart | <LOD | <LOD | <LOD | <LOD | <LOD | <LOD |
| Lungs | <LOD | <LOD | <LOD | <LOD | <LOD | <LOD |
| Kidney | <LOD | <LOD | <LOD | <LOD | <LOD | <LOD |
| Intestine | <LOD | <LOD | <LOD | <LOD | <LOD | <LOD |
| Muscle | <LOD | <LOD | <LOD | <LOD | <LOD | <LOD |
| Bone | <LOD | <LOD | <LOD | <LOD | 285 | 70.1 |
| Marrow | | | | | | |
| Lymph | <LOD | <LOD | <LOD | <LOD | <LOD | <LOD |
| Node | | | | | | |

SD = Standard deviation;
LOD = limit of detection

[1314] As discussed above, tumor-bearing mice were bled at days 1, 4, and 8 post IV-dosing with the immunostimulatory bacterial strains, and serum was collected. The serum was assessed for the levels of the systemic pro-inflammatory cytokines IL-6, TNF-α, IFN-γ, IL-2, and IL-10, on day 1 (D1), day 4 (D4), and day 8 (D8) post-IV dosing, by cytometric bead array (Mouse Inflammation CBA, BD Biosciences).

[1315] As shown in the tables below, on day 1 post-IV dosing of the bacteria, the serum concentrations of all of the cytokines were lower from the mice dosed with strains YS1646Δasd/ΔFLG/ΔpagP/ΔansB/ΔcsgD and YS1646Δasd/ΔFLG/ΔpagP/ΔansB/ΔcsgD/ΔlppAB, compared to the serum concentrations from the mice dosed with the parental YS1646 strain, with the exception of slightly higher levels of IL-6 for the YS1646Δasd/ΔFLG/ΔpagP/ΔansB/ΔcsgD strain. The serum concentrations of IFN-γ, IL-2, and IL-10, from the mice dosed with strains YS1646Δasd/ΔFLG/ΔpagP/ΔansB/ΔcsgD and YS1646Δasd/ΔFLG/ΔpagP/ΔansB/ΔcsgD/ΔlppAB were the same as PBS control on day 1 post-dosing (i.e., 0 pg/mL). The parental strain, YS1646, demonstrated peak systemic cytokine levels on day 4 for IL-6, IFN-γ, and IL-2, while the serum cytokine levels after administration of each of the deletion strains were well below those observed after administration of the parental strain, and closer to the PBS vehicle control measurements. The high serum concentration of IL-10, which is a direct target of TLR2 signaling, on day 1 from dosing with the parental strain, was absent after dosing with each of the deletion strains, which contain deletions or modifications of TLR2 agonists (e.g., lipoproteins).

[1316] These data demonstrate that the genomic deletions that modify TLR2, TLR4, and TLR5 signaling in the YS1646Δasd/ΔFLG/ΔpagP/ΔansB/ΔcsgD and YS1646Δasd/ΔFLG/ΔpagP/ΔansB/ΔcsgD/ΔlppAB deletion strains, largely abrogate the production of systemic pro-inflammatory cytokines, despite robust bacterial tumor colonization. As a result, strains YS1646Δasd/ΔFLG/ΔpagP/ΔansB/ΔcsgD and YS1646Δasd/ΔFLG/ΔpagP/ΔansB/ΔcsgD/ΔlppAB are well-tolerated, and, if needed, can be dosed at higher concentrations than parental strain YS1646, leading to enhanced therapeutic efficacy.

Serum Levels of IL-6, TNF-α and IFN-γ in Response to IV-Dosing
of Tumor-Bearing Mice with Immunostimulatory Bacterial Strains

| | IL-6 (pg/mL) | | | TNF-α (pg/mL) | | | IFN-γ (pg/mL) | | |
|---|---|---|---|---|---|---|---|---|---|
| Strain | D1 | D4 | D8 | D1 | D4 | D8 | D1 | D4 | D8 |
| PBS Control | 2.7 | 1.4 | 1.4 | 1.7 | 1.2 | 4.2 | 0.0 | 15.2 | 0.6 |
| YS1646 | 48.7 | 309.1 | 65.9 | 4.1 | 2.1 | 95.6 | 149 | 145.8 | 52.6 |
| YSI646Δasd/ΔFLG/ | 77.2 | 28.1 | 26.0 | 3.0 | 1.2 | 17.8 | 0.0 | 9.1 | 25.1 |
| ΔpagP/ΔansB/ΔcsgD | | | | | | | | | |
| YS1646Δasd/ΔFLG/ | 15.5 | 1.8 | 22.8 | 2.4 | 1.2 | 0.8 | 0.0 | 4.1 | 6.6 |
| ΔpagP/ΔansB/ΔcsgD/ | | | | | | | | | |
| ΔlppAB | | | | | | | | | |

Serum Levels of IL-2 and IL-10 in Response to IV-Dosing of
Tumor-Bearing Mice with Immunostimulatory Bacterial Strains

| | IL-2 (pg/mL) | | | IL-10 (pg/mL) | | |
|---|---|---|---|---|---|---|
| Strain | D1 | D4 | D8 | D1 | D4 | D8 |
| PBS Control | 0.0 | 25.0 | 14.2 | 0.0 | 1.8 | 1.8 |
| YS1646 | 4.1 | 212.7 | 201.0 | 202.1 | 2.2 | 8.0 |
| YS1646Δasd/ΔFLG/ | 0.0 | 33.2 | 61.5 | 0.0 | 1.8 | 8.8 |
| ΔpagP/ΔansB/ΔcsgD | | | | | | |
| YS1646Δasd/ΔFLG/ | 0.0 | 15.9 | 22.1 | 0.0 | 1.8 | 1.8 |
| ΔpagP/ΔansB/ΔcsgD/ | | | | | | |
| ΔlppAB | | | | | | |

[1317] These data show that the YS1646Δasd/ΔFLG/ΔpagP/ΔansB/ΔcsgD and YS1646Δasd/ΔFLG/ΔpagP/ΔansB/ΔcsgD/ΔlppAB deletion strains are rapidly cleared from naïve mice following IV dosing, and do not require antibiotic clearance. In naïve and tumor-bearing mice, the deletion strains preferentially colonize tumors compared to healthy tissues, and the expression of plasmid-encoded payloads is tumor-specific. Further, unlike the parental YS1646 strain, the YS1646Δasd/ΔFLG/ΔpagP/ΔansB/ΔcsgD and YS1646Δasd/ΔFLG/ΔpagP/ΔansB/ΔcsgD/ΔlppAB deletion strains do not elicit pro-inflammatory systemic cytokines that are toxic and immunosuppressive, despite robust tumor colonization, indicating that these strains are well-tolerated in vivo, and, if necessary, can be dosed at higher concentrations than strain YS1646 (VNP20009), resulting in higher therapeutic efficacy.

### Example 30

### Modifications to the Delivery Plasmid Encoding Immunomodulatory Payloads

[1318] Delivery plasmids encode genes and regulatory elements that are required for bacterial fitness and function, as well as for the proper expression of encoded complex polycistronic eukaryotic payloads. The switch between such evolutionarily divergent organisms introduces challenges for proper functioning in both. In bacteria, transcriptional leakiness from eukaryotic promoters, such as the CMV promoter, is observed. A promoter is considered “leaky” where there is always some level of basal transcription in bacteria from the eukaryotic promoter. This promoter leakiness, combined with large eukaryotic genes and regulatory sequences, when encoded (e.g., on plasmids) in bacteria, results in reduced bacterial fitness that manifests in low injection stock viability, and reduced growth rate in broth culture. It was found herein that bacterial fitness was affected by the leakiness from the eukaryotic promoter. The leaky promoter can affect bacterial fitness for several reasons, such as the increased transcriptional/translational load, and due to partial expression of normally secreted eukaryotic proteins that can be toxic to the bacterial cells as they accumulate.

[1319] To decrease CMV promoter leakiness and improve bacterial growth and fitness, it is shown herein that bacterial CMV leakiness can be decreased or inhibited, for example, by including bacterial-specific terminator sequences, such as the phage T4, trpA, and BBa_B0015 terminators, and/or by placing a strong bacterial promoter in the opposing orientation (i.e., including a reverse promoter). For example, a reverse promoter (a promoter in the antisense orientation), referred to herein as RevMTL*, is a strong promoter that is derived from the MTL promoter (available from Molecular Technologies Laboratories), that is in turn derived from the proD promoter (see, e.g., Davis et al. (2011) Nucleic Acids Research 39(3):1131-1141), and which was mutated to remove all antisense ATGs in the sequence, to eliminate or reduce the expression of eukaryotic genes.

[1320] It is shown herein that engineered mutations, that alter the predicted bacterial promoter sequences within a eukaryotic promoter, also can be used to generate variants with decreased CMV promoter leakiness. In addition to CMV promoter leakiness, robust asd expression readthrough (in asd⁻ strains containing plasmids incorporating an asd complementation system) can cause leakiness through the expression cassette of the eukaryotic payloads. It is shown herein that strategies to block or decrease asd expression readthrough include placing the expression cassette in a reverse orientation, and/or inserting a bacterial terminator sequence between the asd gene and the payload expression cassette.

[1321] To minimize the negative impacts to bacterial fitness, while maintaining high ectopic gene/payload expression in mammalian cells, the delivery plasmid was systematically modified in four distinct ways, as follows:

[1322] 1) cryptic bacterial promoter sequences, encoded within the CMV promoter enhancer region, were identified using PromoterHunter (available online at phisite.org/promoterhunter/; see, e.g., Klucar et al. (2010) Nucleic Acids Res. 38(Database issue):D366-D370), and putative promoter sequences were then replaced with CREB-binding sites and partial CREB-binding sites to promote efficient plasmid delivery;

[1323] 2) to inhibit transcriptional leakiness from the CMV promoter, a number of bacterial terminators were inserted into the 5′ untranslated region (UTR) of open reading frame (ORF) 1, to inhibit expression in bacteria (see table below);

[1324] 3) to reduce the level of readthrough transcription from the origin of replication, the orientation of the expression cassette, from upstream of the CMV promoter to the end of the polyadenylation signal, was reversed, with and without a transcription terminator inserted between the expression cassette and the origin of replication; and

[1325] 4) modifications from among 1)-3) above, that resulted in increased injection stock viability, with enhanced in vitro genetic payload expression, were combined for further improvement.

[1326] To measure the expression of encoded payloads from bacterially-infected eukaryotic cells, THP-1 human macrophage cells (ATCC catalog #202165) were infected with strains of S. typhimurium YS1646Δasd/ΔfliC/ΔfljB/ΔpagP/ΔansB/ΔcsgD, containing plasmids encoding a functional asd gene to ensure plasmid maintenance, as well as a complex eukaryotic expression cassette (CMV muIL-12p70_T2A_muIL-18 HPRE bGHpolyA+EF-1α muSTING C205Y WPRE SV40polyA), with the modifications discussed above, and listed in the table below. Plasmid ADN-287 contains the eukaryotic expression cassette and no further modifications. Plasmids ADN-397, ADN-398, and ADN-399 each contain one unique CMV cryptic promoter replacement (with a CREB-binding site or partial CREB-binding site); plasmids ADN-400, ADN-401, and ADN-402 each contain two CMV cryptic promoter replacements; and plasmid ADN-403 contains three CMV cryptic promoter replacements. Plasmid ADN-355 contains the eukaryotic expression cassette from plasmid ADN-287, in the reverse orientation; plasmid ADN-358 contains the expression cassette from plasmid ADN-287 with a BBa_B0015 terminator placed downstream of the polyadenylation site, and the expression cassette is in the reverse orientation; plasmid ADN-325 contains the T4 bacterial terminator between the CMV promoter and the ADN-287 expression cassette; plasmid ADN-382 is the same as plasmid ADN-325, but the expression cassette is placed in the reverse orientation; plasmid ADN-373 contains the T4 bacterial terminator between the CMV promoter and the ADN-287 expression cassette, which is followed by the BBa_B0015 terminator, and the expression cassette is in the reverse orientation; plasmid ADN-327 contains the trpA bacterial terminator between the CMV promoter and the ADN-287 expression cassette; plasmid ADN-381 is the same as plasmid ADN-327, but the expression cassette is in the reverse orientation; plasmid ADN-372 contains the trpA bacterial terminator between the CMV promoter and the ADN-287 expression cassette, which is followed by the BBa_B0015 terminator, and the expression cassette is in the reverse orientation; plasmid ADN-329 contains the RevMTL* promoter (see description above) between the CMV promoter and the ADN-287 expression cassette; plasmid ADN-383 is the same as plasmid ADN-329, but the expression cassette is in the reverse orientation; plasmid ADN-374 contains the RevMTL* promoter between the CMV promoter and the ADN-287 expression cassette, which is followed by the BBa_B0015 terminator, and the expression cassette is in the reverse orientation; and plasmid ADN-328 contains the BBa_B0015 terminator between the CMV promoter and the ADN-287 expression cassette. Plasmid ADN-257 contains the gene encoding muIL12-p70, under control of the CMV promoter, and no further modifications.

[1327] 5×10⁵ cells were placed in each well of a 24-well dish, with RPMI and 10% FBS. Cells were infected with washed, stationary phase cultures of S. typhimurium strain YS1646Δasd/ΔfliC/ΔfljB/ΔpagP/ΔansB/ΔcsgD (containing one of the plasmids described above and listed in the table below), for 1 hour at an MOI of 200 CFUs per cell, and then the cells were washed with PBS, and the media was replaced with media containing 200 μg/mL of gentamicin to kill extracellular bacteria. After 24 hours, the cells were lysed with 350 μL of Buffer RLT with β-mercaptoethanol (β-ME) (Qiagen), and RNA extraction was performed using the Qiagen RNeasy® Mini Kit, with the following modifications. A genomic DNA elimination step, using an RNase-Free DNase kit (Qiagen) was included in the kit to remove genomic DNA from the total RNA. Total RNA concentration was measured using a NanoDrop™ One^{C} UV-Vis Spectrophotometer (Thermo Fisher Scientific). RNA was stored at −80° C. without freeze-thawing until reverse-transcription was performed. cDNA synthesis was performed using 0.4-1 μg of template RNA using a C1000 Touch™ Thermal Cycler (Bio-Rad) and SuperScript™ VILO™ Master Mix (Invitrogen) in a 30 μL reaction, according to the manufacturer's instructions.

[1328] qPCR (quantitative polymerase chain reaction) was performed with a CFX96™ Real-Time PCR Detection System (Bio-Rad). SYBR® primers for murine IL-12 (Assay ID: qMmuCID0015668) were purchased from Bio-Rad. The qPCR reaction (20 μL) was conducted per protocol, using the iTaq™ Universal SYBR® Green Supermix (Bio-Rad). The standard thermocycling program on the Bio-Rad CFX96™ Real-Time PCR Detection System consisted of a 95° C. denaturation for 30 seconds, followed by 40 cycles of 95° C. for 5 seconds and 60° C. for 30 seconds. Reactions with template-free control were included for each set of primers on each plate. All samples were run in duplicate, and the mean C_{q} values were calculated. Quantification of the target mRNA was normalized using beta-actin reference mRNA (Bio-Rad, qMmuCED0027505). ΔC_{q} was calculated as the difference between target (i.e., muIL-12p70) and reference (i.e., beta-actin) gene. ΔΔC_{q} was obtained by normalizing the ΔC_{q} values of the individual strains, to the ΔC_{q} values of the strain carrying the unmodified plasmid (ADN-287; see table below). Fold expression was calculated as 2\hat{ }-ΔΔC_{q}.

[1329] The doubling time for each of the individual bacterial strains was calculated from broth growth curves, which were performed by diluting OD₆₀₀-normalized stationary cultures to OD₆₀₀=0.05, and growing at 37° C. with shaking overnight, and then using a SpectraMax® M3 Spectrophotometer (Molecular Devices) to read the OD₆₀₀ every 15 minutes. Doubling time (G) was derived from the exponential growth phase, using the formula G=t/n, where t=time interval (t_{final}−tₛₜₐᵣₜ) in minutes, and n=(log OD_{600(final)}−log OD₆₀₀₍ₛₜₐᵣₜ₎)/log 2.

[1330] Injection stocks were prepared by washing a 25 ml overnight stationary culture of each S. typhimurium YS1646Δasd/ΔfliC/ΔfljB/ΔpagP/ΔansB/ΔcsgD strain, grown in 4×YT medium in an ice-cold solution of 10% glycerol in PBS three times, normalizing to an OD₆₀₀=2, and flask-freezing 1 ml aliquots in dry ice. Stocks were stored at −80° C. Injection stock viability was determined by titering thawed injection stock vials, by dividing the colony forming units (CFUs) per vial by the expected CFUs based on OD₆₀₀. The results for the muIL-12p70 expression levels, bacterial doubling times, injection stock viabilities, and average stationary phase ending 0D600 readings, for the YS1646Δasd/ΔfliC/ΔfljB/ΔpagP/ΔansB/ΔcsgD strains containing each of the described plasmids (with and without the discussed modifications), are shown in the table below.

Effects of Plasmid Modifications on Pay oad Expression Levels and Bacterial Fitness

| | | Average | | | Average |
|---|---|---|---|---|---|
| | | Fold | Average | | Stationary |
| | | muIL-12 | Doubling | Injection | Phase |
| | | Expression | Time | Stock | Ending |
| Plasmid | Description | (RT-qPCR) | (mins) | Viability | OD₆₀₀ |
| ADN-287 | CMV-muIL- | 1.0 | 125 | 22% | 3.62 |
| | 12p70_T2A_muIL-18 + | | | | |
| | EF-1α_muSTING C205Y | | | | |
| ADN-397 | CMV cryptic promoter | 1.3 | 146 | 23% | 3.54 |
| | replacement 1 (ADN-287) | | | | |
| ADN-398 | CMV cryptic promoter | 1.5 | 150 | 23% | 4.14 |
| | replacement 2 (ADN-287) | | | | |
| ADN-399 | CMV cryptic promoter | 7.2 | 145 | 22% | 3.78 |
| | replacement 3 (ADN-287) | | | | |
| ADN-400 | CMV cryptic promoter | 1.4 | 136 | 16% | 3.88 |
| | replacements 1 + 2 (ADN- | | | | |
| | 287) | | | | |
| ADN-401 | CMV cryptic promoter | 1.3 | 147 | 18% | 4.16 |
| | replacements 1 + 3 (ADN- | | | | |
| | 287) | | | | |
| ADN-402 | CMV cryptic promoter | 1.0 | 138 | 26% | 2.58 |
| | replacements 2 + 3 (ADN- | | | | |
| | 287) | | | | |
| ADN-403 | CMV cryptic promoter | 0.6 | 139 | 17% | 3.96 |
| | replacements 1 + 2 + 3 (ADN- | | | | |
| | 287) | | | | |
| ADN-355 | (ADN-287 Cassette) Reverse | 2.0 | 110 | 31% | 4.08 |
| | orientation | | | | |
| ADN-358 | (ADN-287 Cassette- | 1.7 | 108 | 24% | 4.22 |
| | BBa_B0015 terminator) | | | | |
| | Reverse orientation | | | | |
| ADN-325 | CMV-T4 terminator-ADN- | 0.7 | 96 | 41% | 3.82 |
| | 287 Cassette | | | | |
| ADN-382 | (CMV-T4 terminator-ADN- | 6.1 | 99 | 13% | 3.96 |
| | 287 Cassette) Reverse | | | | |
| | orientation | | | | |
| ADN-373 | (CMV-T4 terminator-ADN- | 1.5 | 101 | 41% | 3.98 |
| | 287 Cassette-BBa_B0015 | | | | |
| | terminator) Reverse | | | | |
| | orientation | | | | |
| ADN-327 | CMV-trpA terminator-ADN- | 1.4 | 105 | 40% | 3.80 |
| | 287 Cassette | | | | |
| ADN-381 | (CMN-trpA terminator-ADN- | 2.5 | 112 | 27% | 2.58 |
| | 287 Cassette) Reverse | | | | |
| | orientation | | | | |
| ADN-372 | (CMN-trpA terminator-ADN- | 11.6 | 105 | 13% | 3.59 |
| | 287 Cassette-BBa_B0015 | | | | |
| | terminator) Reverse | | | | |
| | orientation | | | | |
| ADN-329 | CMV-RevMTL* promoter- | 0.9 | 105 | 36% | 3.92 |
| | ADN-287 Cassette | | | | |
| ADN-383 | (CMV-RevMTL* promoter- | 1.8 | 121 | 24% | 3.56 |
| | ADN-287 Cassette) Reverse | | | | |
| | orientation | | | | |
| ADN-374 | (CMV-RevMTL* promoter- | 0.8 | 110 | 15% | 3.17 |
| | ADN-287 Cassette- | | | | |
| | BBa_B0015 terminator) | | | | |
| | Reverse orientation | | | | |
| ADN-328 | CMV-BBa_B0015 terminator- | 3.8 | 108 | 10% | 2.87 |
| | ADN-287 Cassette | | | | |
| ADN-257 | CMV-muIL-12p70 | 4.1 | 98 | — | — |

RevMTL* is reverse promoter (a promoter in the antisense orientation) that is a strong bacterial promoter, derived from the MTL promoter (Molecular Technologies Laboratories), which is derived from the proD promoter, and which was mutated to remove all antisense ATGs to reduce or eliminate the expression of eukaryotic genes.

[1331] The results show that, when the expression cassette was reversed on the plasmid and followed by the BBa_B0015 terminator, and the T4 terminator was inserted downstream of the CMV promoter ((CMV-T4 terminator-ADN-287 Cassette-BBa_B0015 terminator) Reverse orientation; see results for plasmid ADN-373), there was an increase in the bacterial cell viability, compared to the strain carrying the parental plasmid, ADN-287 (41% injection stock viability compared to 22%). The strain carrying this plasmid also expressed higher levels of muIL-12p70 in vitro (1.5 compared to 1.0), had a reduced doubling time (101 min compared to 125 min), and grew to a higher stationary OD₆₀₀ (3.98 compared to 3.62), compared to the same strain carrying the parental plasmid, ADN-287. No other plasmid resulted in such improvements across all metrics.

[1332] Thus, where a plasmid encodes complex polycistronic eukaryotic payloads, the combination of 1) inserting a bacterial terminator, such as the T4 bacterial terminator, downstream of the CMV promoter; 2) following the expression cassette with another terminator, such as the bacterial BBa_B00015 terminator; and 3) reversing the orientation of the eukaryotic expression cassette on the plasmid, increases the efficiency of encoded payload expression and improves bacterial fitness.

### Example 31

### Genetically Modified Strains Reduce Inflammation in Whole Human Blood and in Primary Human Macrophages

[1333] To evaluate the inflammatory profiles resulting from the administration of different variants of the immunostimulatory bacterial strains, strains ATCC #14028 (wild-type (WT) S. typhimurium), YS1646, YS1646Δasd, YS1646Δasd/ΔFLG, YS1646Δasd/ΔFLG/ΔpagP, YS1646Δasd/ΔFLG/ΔpagP/ΔansB/ΔcsgD, YS1646Δasd/ΔFLG/ΔpagP/ΔansB/ΔcsgD/F-ΔpurI (also referred to herein as YS1646Δasd/ΔFLG/ΔpagP/ΔansB/ΔcsgD/ΔpurI_{(full clean)}), and E. coli strain NEB 5-alpha, each carrying plasmids (CMV NanoLuc) that encode the luciferase NanoLuciferase® (Promega), were incubated with human blood for 2 hours at 37° C. The incubations were in performed in a 96-well format, with 200 μl of blood and 5×10³ CFUs of bacteria. At 2 hours post-infection, the blood was centrifuged at 300 relative centrifugal force (rcf) for 5 minutes, and serum was isolated for cytokine profile analysis by human antiviral cytokine bead array analysis (BioLegend), in accordance with the manufacturer's instructions.

[1334] Analysis of the levels of cytokines released from the human blood, following incubation with the various strains, showed that incubation with strain YS1646 resulted in reduced the levels of the pro-inflammatory cytokines IL-6 and TNF-α, compared to incubation with WT strain ATCC 14028. Additional genomic modifications further reduced the levels of pro-inflammatory cytokines released from the human blood.

| | Cytokine Levels | | | |
|---|---|---|---|---|
| | IL-6 | | TNF-α | |
| | Mean | | Mean | |
| Strain | (pg/ml) | STDEV | (pg/ml) | STDEV |
| Uninfected control | 18.8 | ±1.1 | 69.2 | ±2.9 |
| Wild-type S. typhimurium strain ATCC 14028 | 155.1 | ±32.7 | 464.3 | ±77.9 |
| (CMV NanoLuc ®) | | | | |
| YS1646 (CMV NanoLuc ®) | 48.1 | ±20.4 | 105.0 | ±24.4 |
| YS1646Δasd (CMV NanoLuc ®) | 19.3 | ±1.2 | 68.4 | ±6.1 |
| YSl646Δasd/ΔFLG (CMV NanoLuc ®) | 23.7 | ±4.4 | 78.3 | ±6.0 |
| YS1646Δasd/ΔFLG/ΔpagP (CMV NanoLuc ®) | 17.1 | ±5.7 | 57.8 | ±19.9 |
| YS1646Δasd/ΔFLG/ΔpagP/ΔansB/ΔcsgD | 21.1 | ±7.6 | 74.2 | ±33.4 |
| (CMV NanoLuc ®) | | | | |
| YS1646Δasd/ΔFLG/ΔpagP/ΔansB/ΔcsgD/F- | 21.0 | ±1.3 | 75.1 | ±4.9 |
| ΔpurI (CMV NanoLuc ®) | | | | |
| E. coli NEB 5-alpha (CMV NanoLuc ®) | 152.9 | ±24.1 | 519.0 | ±236.5 |

STDEV = standard deviation

[1335] To determine the how the genomic modifications in bacteria, such as S. typhimurium, influence inflammation during infection of primary human myeloid cells, bactofection of human M2 macrophages was performed. Primary human monocytes were differentiated in ImmunoCult™-SF Macrophage Medium (StemCell Technologies), containing 100 ng/ml human macrophage colony-stimulating factor (M-CSF), for 5 days. On day 6, cells were supplemented with additional medium containing 150 ng/ml M-CSF and 60 ng/ml huIL-4 for 48 hours, to generate M2 macrophages. The cells then were infected with stationary phase bacterial strains (strains described above), which were grown overnight at 37° C. in 4×YT medium, at an MOI of 10. The cells were inoculated with bacteria, and centrifuged for 5 minutes at 500 rcf, followed by an incubation at 37° C. for 1 hour. The cells then were washed twice with DPBS, and then incubated in fresh ImmunoCult™-SF Macrophage Medium with 100 μg/ml gentamicin. Supernatants were harvested at 0, 2, 6, 24, and 48 hours post-infection. The cytokine measurements were performed by MESO scale analysis, according to the manufacturer's instructions.

[1336] The results, which are summarized in the table below, show that, at 24 hours post-infection, macrophages infected with strains YS1646, YS1646Δasd, and YS1646Δasd/ΔFLG released the highest levels of IL-6, with WT bacteria (strain ATCC 14028) inducing less IL-6. Successive genomic modifications resulting in decreased levels of IL-6 secretion, with strains YS1646Δasd/ΔFLG/ΔpagP/ΔcsgD and YS1646Δasd/ΔFLG/ΔpagP/ΔansB/ΔcsgD inducing the lowest levels of IL-6. Similar trends were observed with TNF-α.

| | Cytokine Levels, 24 hours | | | |
|---|---|---|---|---|
| | IL-6 | | TNF-α | |
| | Mean | Range | Mean | Range |
| Strain | (pg/ml) | (pg/ml) | (pg/ml) | (pg/ml) |
| Uninfected control | 1.1 | — | 1.23 | — |
| Wild-type S. typhimurium strain ATCC | 10450.7 | 285.0 | 2895.508 | 230.262 |
| 14028 (CMV NanoLuc ®) | | | | |
| YS1646 (CMV NanoLuc ®) | 13653.2 | 332.3 | 5282.976 | 71.708 |
| YS1646Δasd (CMV NanoLuc ®) | 14516.3 | 693.3 | 5100.7465 | 793.867 |
| YS1646Δasd/ΔFLG (CMV NanoLuc ®) | 13767.5 | 1540.7 | 3572.248 | 150.534 |
| YS1646Δasd/ΔFLG/ΔpagP (CMV | 6985.6 | 650.2 | 758.4872 | 136.6448 |
| NanoLuc ®) | | | | |
| YS1646Δasd/ΔFLG/ΔpagP/ΔcsgD (CMV | 6746.1 | 622.0 | 1431.149 | 367.154 |
| NanoLuc ®) | | | | |
| YS1646Δasd/ΔFLG/ΔpagP/ΔansB/ΔcsgD | 6584.1 | 1389.7 | 502.1081 | 44.983 |
| (CMV NanoLuc ®) | | | | |

### Example 32

### csgD-Deleted Strains Induce Vascular Leakage in Human Vascular Endothelial Cells

[1337] The ability to promote vascular leakage is an advantageous feature for facilitating bacterial entry into the tumor vasculature, and for promoting greater tumor colonization. It is shown in this example that ΔcsgD strains possess this feature. Parental strain YS1646 was compared to the derivative strains YS1646Δasd/ΔFLG/ΔpagP and YS1646Δasd/ΔFLG/ΔpagP/ΔansB/ΔcsgD, for the ability to activate innate immune sensing in human umbilical vein endothelial cells (HUVECs), and for the ability to stimulate a subsequent increase in endothelial monolayer permeability. This was assessed using an In Vitro Vascular Permeability Assay kit (Millipore, Catalog No. ECM642). Strains of YS1646Δasd/ΔFLG/ΔpagP and YS1646Δasd/ΔFLG/ΔpagP/ΔansB/ΔcsgD, each containing a plasmid encoding secreted NanoLuciferase® (EF-1α secNanoLuc®), were used. Human umbilical vein endothelial cells (HUVECs) were seeded onto semi-permeable collagen-coated membrane inserts, in a 96-well plate chamber, according to the manufacturer's instructions, at a concentration of 5×10⁵ cells/well. Confluency was monitored daily, until endothelial monolayer formation was confirmed, and determined to efficiently occlude the membrane pores (96 hours post-seeding).

[1338] The bacterial strains were grown in 3 mL of 4×YT media (TEKNOVA, Catalog No. 2Y1085), with shaking at 37° C. in vented cap 50 mL conical vials, overnight to stationary phase, and were prepared the following day by pelleting and re-suspending in PBS. Bacterial samples were normalized by OD_{600 nm} to a concentration of 2.5×10⁸CFU/mL, and were added to the HUVEC insert wells in 100 μL volume, to achieve an MOI of 50. The plate was spun at 500 rcf for 5 minutes to synchronize engagement of CFUs with HUVECs, and then the plate was incubated for 1 hour at 37° C. Gentamicin was then added to the insert wells to a final concentration of 200 μg/mL. At 24 hours post-bactofection, medium in the inserts was collected (and saved for cytokine analysis), and 75 μL of Fluorescein isothiocyanate-Dextran (FITC-Dextran; at a 1:40 dilution) was added, and the mixture was incubated in the dark, at room temperature, for 20 minutes. Medium from the receiver tray was collected and analyzed on a spectrophotometer at an excitation wavelength of 485 nm and an absorbance wavelength of 535 nm, and 1:40 FITC-Dextran solution was run directly as a positive control.

[1339] At 24 hours post-bactofection, and following incubation with FITC-Dextran solution, wells that were not treated with engineered, attenuated S. typhimurium strains (i.e., medium alone) generated very low fluorescence values (35), indicating confluency and little disruption of permeability. The parental YS1646-treated wells permitted the greatest amount of FITC-Dextran to pass through the membrane (fluorescence=155), indicating the strongest innate immune stimulation and increase in vascular permeability, while the engineered, attenuated S. typhimurium strains YS1646Δasd/ΔFLG/ΔpagP and YS1646Δasd/ΔFLG/ΔpagP/ΔansB/ΔcsgD permitted less FITC-Dextran to pass through (fluorescence=84 and 91, respectively), yet still maintained the ability to promote vascular permeability.

[1340] To test whether this effect was dependent on cytokines released from the HUVECs, and in particular, IL-6, a human antiviral cytokine bead array analysis (BioLegend) was performed on HUVEC supernatants at 6 hours post-infection, in accordance with the manufacturer's instructions. HUVECs infected with the parental YS1646 strain exhibited very high IL-6 levels (1769.2 pg/mL), compared to the uninfected control (27.19 pg/mL). The YS1646Δasd/ΔFLG/ΔpagP strain induced lower levels of IL-6 (543.3 pg/mL), and the lowest amount of IL-6 was observed with the YS1646Δasd/ΔFLG/ΔpagP/ΔansB/ΔcsgD strain (272.8 pg/mL). Therefore, despite producing lower levels of pro-inflammatory cytokines that induce vascular leakage, the YS1646Δasd/ΔFLG/ΔpagP/ΔansB/ΔcsgD strain demonstrated higher levels of leakage than the YS1646Δasd/ΔFLG/ΔpagP strain. Thus, the ability to promote vascular leakage is an important feature for facilitating bacterial entry into the tumor vasculature, and for promoting greater tumor colonization. Strains described and provided herein possess this feature.

### Example 33

### STING Gain-of-Function Variants Demonstrate Increased CXCL10 (IP-10) to IL-6 Ratios and Increased IFN-β to IL-6 Ratios in Primary Human M2 Macrophages

[1341] To determine the effects of various STING gain-of-function (GOF) mutants (including chimeric STING proteins with GOF mutations), on the downstream cytokine signaling in human M2 macrophages, the GOF mutants were cloned into the pATI-1.75 (also referred to as pATI1.75) vector, described in Example 8 above, which then was transfected into human M2 macrophages for expression, and the cell supernatants were assayed for secreted (expressed) cytokines.

[1342] Frozen human monocytes, isolated from healthy human donors, were thawed in complete medium (RPMI-1640+10% FBS), and washed by centrifugation for 10 minutes at 600×g, at room temperature. The monocytes were resuspended in ImmunoCult™-SF Macrophage Medium (StemCell Technologies) containing 100 ng/mL of human M-CSF+20 ng/mL of human IL-4+20 ng/mL of human IL-10. Monocytes (8e5 to 1e6 cells per well) were then seeded in a 24-well plate, with a final volume of 750 μL. Three days later, 750 μL of ImmunoCult™-SF Macrophage Medium (StemCell Technologies), containing 100 ng/mL human M-CSF+20 ng/mL human IL-4+20 ng/mL human IL-10, was added to each well, and the plate was incubated for four more days. On day seven, the cells were transfected using Viromer® RED mRNA and plasmid transfection reagent (Lipocalyx GmbH), according to the manufacturer's instructions. 500 ng of plasmid DNA from a panel of STING GOF mutants, as well as untransfected control, were diluted in the provided buffer, and mixed with the Viromer® RED transfection reagent, and incubated at room temperature for 15 minutes to allow the DNA/Viromer® RED complexes to form. The DNA/Viromer® RED complexes were then slowly added to each well of the 24-well plate (in triplicate), and the plate was incubated at 37° C. in a 5% CO₂ incubator. Supernatants were harvested after 48 hours of incubation, and were assayed for human CXCL10 (IP-10) and IL-6 using a flow cytometry-based human anti-viral cytokine bead array (BioLegend), according to the manufacturer's protocol. The average of three measurements was calculated, and the ratio of IP-10 to IL-6 was calculated by dividing the IP-10 concentration by the IL-6 concentration.

[1343] The results, which are summarized in the table below, show that the STING variant that resulted in the highest ratio of IP-10 to IL-6 was the huSTING N154S/R284G tazCTT variant (i.e., a chimeric STING protein, containing a modified human STING with a replacement of the CTT with the CTT of Tasmanian devil STING, and the GOF mutations N154S/R284G). The STING variant, containing a replacement of the CTT of human STING with the CTT of Tasmanian devil STING (huSTING tazCTT), displayed higher ratios of IP-10 to IL-6 than the corresponding fully human STING variants with the same mutations, thus, demonstrating an improved anti-tumor response.

Ratio of IP-10 to IL-6 Protein Expression Following Transfection
of M2 Macrophages with plasmids encoding STING Variants

| | Mean Ratio of IP-10 | Standard |
|---|---|---|
| STING Variant | to IL-6 Expression | Deviation |
| Untransfected | 0.6108 | ±0.0960 |
| huSTING N154S | 3.174 | ±0.2006 |
| huSTING R284G | 3.938 | ±0.6123 |
| huSTING N154S/R284G | 3.832 | ±0.1185 |
| huSTING tazCTT N154S | 4.400 | ±0.1957 |
| huSTING tazCTT R284G | 4.497 | ±0.1631 |
| huSTING tazCTT N154S/R284G | 5.253 | ±0.1695 |

[1344] The ratio of IFN-β to IL-6 gene expression in human M2 macrophages, following the expression of various STING variants, was assessed. Frozen human monocytes, isolated from healthy human donors, were thawed in complete medium (RPMI-1640+10% FBS), and washed by centrifugation for 10 minutes at 600×g, at room temperature. The monocytes were resuspended in RPMI-1640+1× non-essential amino acids (NEAA)+5% human AB serum, containing 200 ng/mL human M-CSF+20 ng/mL human IL-4. Monocytes (8e5 to 1e6 cells per well) were then seeded in a 24-well plate, with a final volume of 750 μL. Three days later, 750 μL of RPMI with 5% human AB serum+NEAA, containing 200 ng/mL human M-CSF+20 ng/mL human IL-4, was added to each well, and the plate was incubated for four more days. On day seven, the cells were transfected using Viromer® RED transfection reagent, according to the manufacturer's instructions. 500 ng of plasmid DNA from a panel of STING GOF mutants, including the modified chimeric STING proteins, as well as untransfected control, were diluted in the provided buffer, and mixed with Viromer® RED transfection reagent, and incubated at room temperature for 15 minutes to allow the DNA/Viromer® RED complexes to form. As a positive control, the STING agonist 3'S′ RpRp c-di-AMP (InvivoGen), an analog of the clinical compound ADU-S100, was added to the cells at a concentration of 10 μg/mL. The DNA/Viromer® RED complexes then slowly were added to each well of the 24-well plate (in triplicate), and the plate was incubated for 48 hours at 37° C., in a CO₂ incubator.

[1345] The cells were harvested for qPCR 48 hours post-transfection, and were lysed with 350 μL Buffer RLT lysis buffer with beta-mercaptoethanol (Qiagen). RNA extraction was performed using the Qiagen RNeasy® Plus Mini Kit, with the following modifications. A genomic DNA elimination step, using an RNase-Free DNase kit (Qiagen), was included in the kit to remove genomic DNA from the total RNA. Total RNA concentration was measured using a NanoDrop™ One^{C} UV-Vis Spectrophotometer (Thermo Fisher Scientific). The purity of each sample also was assessed from the A260/A230 absorption ratio. RNA was stored at −80° C. without freeze-thawing, until reverse-transcription was performed.

[1346] Synthesis of cDNA was performed from 0.5-1 μs of template RNA, using a CFX96™ Real-Time System (Bio-Rad) and iScript™ Reverse Transcription Supermix for RT-qPCR (Bio-Rad) in a 20 μL reaction, according to the manufacturer's instructions. qPCR was performed with a CFX96™ Real-Time System (Bio-Rad). Primers for human IFNβ1 (huIFNβ1; Assay ID: qHsaCEP0054112; Bio-Rad) and for huIL-6 (Assay ID: qHsaCEP0051939; Bio-Rad) were used for the qPCR. The qPCR reaction (20 μL) was conducted per protocol, using either the SsoAdvanced™ Universal SYBR® Green Supermix, or the iQ™ Multiplex Powermix (Bio-Rad). The standard thermocycling program on the Bio-Rad CFX96™ Real-Time System comprised a 95° C. denaturation step for 150 seconds, followed by 39 cycles of 95° C. for 15 seconds, and 60° C. for 55 seconds. Quantification of the target mRNA was normalized using actin reference mRNA (Bio-Rad, Assay ID: qHsaCEP0036280). ΔC_{q} was calculated as the difference between target (huIFNβ or huIL-6) and reference (actin) gene. ΔΔC_{q} was obtained by normalizing the ΔC_{q} values of the treatments (transfections), to the ΔC_{q} values of the non-treatment (i.e., untransfected) controls. The ratios of the IFNβ ΔΔC_{q} to the IL-6 ΔΔC_{q} are shown in the table below.

[1347] The results, which are summarized in the table below, show that, of all of the STING GOF mutants screened, the huSTING N154S/R284G tazCTT variant results in the highest ratio of immunostimulatory IFN-β to pro-inflammatory IL-6 expression. Additionally, the chimeric STING constructs, containing a replacement of the CTT of human STING with the CTT of Tasmanian devil STING (e.g., huSTING tazCTT), generally induced higher ratios of IFN-β to IL-6 expression than the corresponding fully human STING constructs comprising the same GOF mutation(s). Increased expression of IFN-β indicates increased IRF3/type I IFN signaling, which is immunostimulatory and beneficial, while decreased IL-6 expression is indicative of reduced NF-κB signaling, which is pro-inflammatory and does not contribute to an anti-tumor response. A higher ratio of IFN-β to IL-6 expression is indicative of an increased anti-tumor/anti-viral type response, and a decreased pro-inflammatory response. Thus, replacement of the CTT, as well as the gain-of-function mutations, in a STING protein, increases the anti-tumor activity of the STING protein, and, hence, the immunostimulatory bacterium.

Ratio of IFN-β to IL-6 Gene Expression Following
Transfection of M2 Macrophages with STING Variants

| | Mean Ratio of IFN-β to | Standard |
|---|---|---|
| STING Variant | IL-6 Gene Expression | Deviation |
| Untransfected control | 1.00 | 0.00 |
| STING Agonist | 4.00 | ±4.24 |
| (3′5′ RpRp c-di-AMP) | | |
| NanoLuc ® Plasmid Control | 16.00 | ±2.83 |
| huSTING WT | 33.00 | ±27.84 |
| huSTING V147L | 7.00 | ±3.46 |
| huSTING N154S | 16.33 | ±11.24 |
| huSTING V155M | 14.00 | ±4.58 |
| huSTING C206Y | 19.00 | ±2.65 |
| huSTING R281Q | 21.33 | ±18.61 |
| huSTING R284S | 6.33 | ±4.93 |
| huSTING R284H | 6.33 | ±2.52 |
| huSTING R284M | 7.33 | ±0.58 |
| huSTING R284G | 9.67 | ±2.52 |
| huSTING V155M/C206Y | 10.67 | ±1.53 |
| huSTING N154S/C206Y | 11.00 | ±6.56 |
| huSTING C206Y/R284G | 11.00 | ±8.19 |
| huSTING V155M/R284G | 10.67 | ±4.93 |
| huSTING N154S/R284G | 48.00 | ±10.39 |
| huSTING WT tazCTT | 16.67 | ±10.41 |
| huSTING V147L tazCTT | 23.00 | ±1.00 |
| huSTING N154S tazCTT | 19.00 | ±6.08 |
| huSTING V155M tazCTT | 22.67 | ±4.16 |
| huSTING C206Y tazCTT | 14.67 | ±7.51 |
| huSTING R281Q tazCTT | 10.67 | ±3.51 |
| huSTING R284S tazCTT | 23.00 | ±8.89 |
| huSTING R284H tazCTT | 31.33 | ±13.43 |
| huSTING R284M tazCTT | 43.00 | ±14.93 |
| huSTING R284G tazCTT | 38.33 | ±12.01 |
| huSTING V155M/C206Y tazCTT | 31.00 | ±15.72 |
| huSTING N154S/C206Y tazCTT | 26.67 | ±11.59 |
| huSTING C206Y/R284G tazCTT | 40.67 | ±14.01 |
| huSTING V155M/R284G tazCTT | 31.33 | ±10.60 |
| huSTING N154S/R284G tazCTT | 108.33 | ±50.90 |

### Example 34

### Design of IL-15 Receptor-α and IL-15 Single-Chain Fusion Proteins

[1348] Fusion proteins, containing human proteins or mouse proteins, were prepared. The mouse proteins are for use in mouse models; the human proteins are for encoding in the immunostimulatory bacteria to be used as human therapeutics.

[1349] A human IL-15 Receptor-α (IL-15Rα) fused to a human IL-15 single-chain (sc) was designed, as follows. Amino acid residues 1-108 of human IL-15Rα (SEQ ID NO:423), which correspond to the leader sequence and sushi domain of IL-15-Rα (plus an additional 13 amino acid residues of IL-15Rα; see, e.g., Bouchaud et al. (2008) J. Mol. Biol. 382(1):1-12) were added in-frame with a Gly-Ser linker that has four repeats of the sequence Gly-Gly-Gly-Gly-Ser (i.e., (GGGGS)₄). The polypeptide sequence corresponding to fully mature human IL-15sc, without the leader sequence or propeptide, and corresponding to amino acid residues 48-162 of SEQ ID NO:425, was added following the linker. The sequence of the resulting human IL-15Rα-IL-15sc fusion protein (SEQ ID NO:426) is as follows:

MAPRRARGCRTLGLPALLLLLLLRPPATRGITCPPPMSVEHADIWVKSYSLYS
RERYICNSGFKRKAGTSSLTECVLNKATNVAHWTTPSLKCIRDPALVHQRPAP
PSGGGGSGGGGSGGGGSGGGGSANWVNVISDLKKIEDLIQSMHIDATLYTE
SDVHPSCKVTAMKCFLLELQVISLESGDASIHDTVENLIILANNSLSSNGNVTE
SGCKECEELEEKNIKEFLQSFVHIVQMFINTS.

where the residues corresponding to residues 1-108 of human IL-15Rα are underlined; the Gly-Ser linker is in bold letters; and the residues corresponding to residues 48-162 of human IL-15 are double underlined.

[1350] Similarly, a murine IL-15Rα-IL-15sc fusion protein (SEQ ID NO:429) was prepared by fusion of a portion of the murine IL-15 Receptor-α (IL-15Rα) protein to a portion of the murine IL-15 single-chain (sc) protein. Amino acid residues 1-132 of murine IL-15Rα (SEQ ID NO:427), which include the leader sequence and sushi domain of IL-15-Ra, were added in-frame with a (GGGGS)₄ linker. The polypeptide sequence corresponding to fully mature murine IL-15sc, without the leader sequence or propeptide, and corresponding to amino acid residues 49-162 of SEQ ID NO:428, was added following the linker. The sequence of the resulting murine IL-15Rα-IL-15sc fusion protein (SEQ ID NO:429), which was used for mouse model experiments, is as follows:

MASPQLRGYGVQAIPVLLLLLLLLLLPLRVTPGTTCPPPVSIEHADIRVK
NYSVNSRERYVCNSGFKRKAGTSTLIECVINKNTNVAHWTTPSLKCIRDP
SLAHYSPVPTVVTPKVTSQPESPSPSAKEPEAGGGGSGGGGSGGGGSGGG
GSNWIDVRYDLEKIESLIQSIHIDTTLYTDSDFHPSCKVTAMNCFLLELQVILHEYSNMTLN
EYSNMETVRNVLYLANSTLSSNKNVAESGCKECEELEEKTFTEFLQSFIRIVQMFINTS

where the residues corresponding to residues 1-132 of murine IL-15Rα are underlined; the Gly-Ser linker is in bold letters; and the residues corresponding to residues 49-162 of murine IL-15 are double underlined.

### Example 35

### IL-15Rα-IL-15sc Induces Curative Effects and Protection from Tumor Re-Challenge in a Mouse Model of Colorectal Carcinoma

[1351] This example demonstrates that immunostimulatory bacteria that encode the IL-15Rα-IL15sc fusion protein (also referred to herein as IL-15/IL-15R alpha chain complex, IL-15 complex, IL-15/IL-15Rα chain complex, and IL-15/IL-15Rα) induce anti-tumor efficacy as a monotherapy. To demonstrate this, S. typhimurium strains, containing plasmids encoding murine IL-15Rα-IL15sc (muIL-15Rα-IL15sc), were prepared. The YS1646Δasd/ΔFLG/ΔpagP/ΔansB/ΔcsgD strain, containing the plasmid encoding muIL-15Rα-IL15sc (i.e., YS1646Δasd/ΔFLG/ΔpagP/ΔansB/ΔcsgD-muIL-15Rα-IL15sc; mouse IL-15Rα-IL15sc was used for the experiments performed in the mouse model), was compared to PBS control, for safety and efficacy in the subcutaneous (SC) flank MC38 colorectal adenocarcinoma model. For this study, 6-8 week-old female C57BL/6 mice (5 mice per group) were inoculated SC in the right flank with MC38 cells (5×10⁵ cells in 100 μL PBS). Mice bearing established flank tumors were intravenously (IV) injected on day 8 with 2×10⁷ CFUs of the YS1646Δasd/ΔFLG/ΔpagP/ΔansB/ΔcsgD-muIL-15Rα-IL15sc strain, or with PBS vehicle control. Tumor measurements and body weights were recorded twice weekly.

[1352] The results showed that the YS1646Δasd/ΔFLG/ΔpagP/ΔansB/ΔcsgD-muIL-15Rα-IL15sc strain demonstrated 50% cures (4/8 vs. 0/8 for PBS, p=0.005, day 21), after a single IV injection. At 66 days post-tumor implantation (day 57 post-IV dosing), cured mice (N=4) were re-implanted, on the opposite flank, with 5×10⁵ MC38 cells, and tumor growth was compared to naïve, age-matched mice (N=5). By day 30 post re-implantation, all mice in the group cured with strain YS1646Δasd/ΔFLG/ΔpagP/ΔansB/ΔcsgD-muIL-15Rα-IL15sc remained tumor-free, whereas all mice in the naïve group had reached maximum tumor volume. These data demonstrate the potent and curative effects of delivery of the IL-15Rα-IL15sc fusion protein via an immunostimulatory bacterium, such as strain YS1646Δasd/ΔFLG/ΔpagP/ΔansB/ΔcsgD-muIL-15Rα-IL15sc, and demonstrate the induction of durable protective immune memory in a model of colorectal carcinoma.

### Example 36

### Optimized Expression Cassettes for High-Level, Multiplexed Expression of Encoded Therapeutic Products

[1353] Elements, known as Internal Ribosomal Entry Sites (IRES), can promote protein translation by enhancing ribosomal binding and stabilization of mRNA through mimicking the 5′mRNA cap. IRES elements from viruses and mammalian cells are well-known. Of these, an endogenous human IRES, known as Vascular Endothelial Growth Factor and Type 1 Collagen Inducible Protein (VCIP), previously was demonstrated to enhance expression from a bicistronic vector, encoding Firefly and Renilla luciferases, where the Renilla luciferase, which was the downstream gene (i.e., encoded after the VCIP IRES), was expressed in vitro and in vivo, without the need for a second promoter (see, e.g., Licursi et al. (2011) Gene Therapy 18(6):631-636).

[1354] Plasmids containing combinations of human or mouse IL-15Rα-IL-15sc and huSTING N154S/R284G tazCTT, or human or mouse IL-15Rα-IL-15sc, huSTING N154S/R284G tazCTT, and an anti-CTLA-4 scFv-Fc, where the bicistronic and polycistronic constructs contain 2A peptides, were tested for expression of each encoded payload/product against single expresser controls. Additionally, combination constructs, containing the VCIP IRES, also were tested.

[1355] HEK293T STING Null Cells (293-Dual™ Null Cells; InvivoGen) were used, which do not contain endogenous STING, and express secreted embryonic alkaline phosphatase (SEAP), placed under the control of the endogenous IFN-stimulated response element (ISRE) promoter, where the coding sequence of ISRE is replaced by the SEAP ORF using knock-in technology. STING activity can thus be assessed by monitoring type I IFN induced SEAP production. The 293-Dual™ Null cells also express Lucia™ luciferase, a secreted luciferase, placed under the control of the endogenous IFN-β promoter; the coding sequence of IFN-β has been replaced by the Lucia™ luciferase ORF using knock-in technology. This allows for the assessment of STING activity by monitoring the expression of IFN-β. Using these cells, STING activity can be assessed by monitoring ISRE-induced SEAP production and/or IFN-β-dependent expression of Lucia™ luciferase. The two reporter proteins, SEAP and Lucia™ Luciferase, can be measured in the cell supernatant using standard assays and detection reagents, such as the QUANTI-Blue™ and QUANTI-Luc™ detection reagents (InvivoGen), respectively.

[1356] The cells were seeded in 24-well plates coated with poly-L-lysine at 200,000 cells per well, and incubated overnight at 37° C. in a 5% CO₂ incubator, to achieve 80% confluency. The following day, 300 ng of each plasmid DNA, and 40 ng of a CMV-GFP vector (i.e., a vector encoding green fluorescent protein under the control of a CMV promoter), were diluted in serum-free media and added to FuGENE® transfection reagent (Promega), at the proper reagent:DNA ratios, with untransfected wells serving as negative controls (in duplicates). Cell culture supernatants from each sample were collected 48 hours post-transfection.

[1357] The STING activity of the huSTING N154S/R284G tazCTT variant was evaluated using the ISRE-SEAP and IFN-β-Lucia™ reporter systems. The type I interferon (IFN) activity (induced by STING) was assessed by monitoring type I IFN-stimulated SEAP production in the cell supernatants. 20 μL of cell culture supernatant was added to 180 μL of QUANTI-Blue™ reagent (InvivoGen), which is used for measuring SEAP. Type I interferon activation was determined by measuring ISRE-induced SEAP activity on a SpectraMax® M3 Spectrophotometer (Molecular Devices), at an absorbance wavelength of 650 nm. The type I interferon (IFN) activity (induced by STING) also was assessed by monitoring the type I IFN-stimulated Lucia™ luciferase production in the cell supernatants. 20 μL of cell culture supernatant was added to 50 μL of QUANTI-Luc™ reagent (InvivoGen), which is used for measuring Lucia™ luciferase activity. Type I interferon activation was determined by measuring IFNβ-induced Lucia™ luciferase activity on a SpectraMax® M3 Spectrophotometer (Molecular Devices), on the luminescence setting.

[1358] Cell culture supernatants also were assessed for the expression of human or mouse IL-15Rα-IL-15sc (see, Example 34), and for the expression of human or mouse anti-CTLA-4 scFv-Fc (see, Example 20). For the muIL-15Rα-IL-15sc constructs, the murine IL-15Rα-IL-15sc ELISA (R&D) was used, per kit instructions. For the huIL-15Rα-IL-15sc constructs, the human IL-15Rα-IL-15sc ELISA (R&D) was used, per kit instructions. Direct ELISAs, with human and mouse CTLA-4-Fc (R&D Systems), were performed on the cell culture supernatants of cells transfected with plasmids encoding anti-human CTLA-4 scFv-Fc and anti-murine CTLA-4 scFv-Fc, to measure the expression levels of these proteins.

[1359] GFP production was detected by flow cytometry, and was used to normalize the transfections to each other. 48 hours post-transfection, the cells were washed twice with PBS+2% FBS by centrifugation at 1300 RPM for 3 minutes. The cells then were resuspended in PBS+2% FBS with DAPI (dead/live stain). Flow cytometry data were acquired using the ACEA NovoCyte® flow cytometer (ACEA Biosciences, Inc.), and analyzed using the FlowJo™ software (Tree Star, Inc.).

[1360] As shown in the table below, all constructs containing the huSTING N154S/R284G tazCTT variant displayed ISRE-SEAP reporter activity and IFNβ-Lucia™ luciferase reporter activity. The construct designated 2.1 CMV VCIP muIL-15Rα-IL-15sc_T2A_huSTING N154S/R284G tazCTT, which contains the VCIP IRES and a T2A peptide for expression of the combination of muIL-15Rα-IL-15sc and huSTING N154S/R284G tazCTT, results in the highest expression levels of muIL-15Rα-IL-15sc, when normalized by GFP co-transfection. Similarly, the construct designated 2.1 CMV VCIP huIL-15Rα-IL-15sc_T2A_huSTING N154S/R284G tazCTT, which contains the VCIP IRES and a T2A peptide for expression of the combination of huIL-15Rα-IL-15sc and huSTING N154S/R284G tazCTT, results in the highest expression levels of huIL-15Rα-IL-15sc, when normalized by GFP co-transfection. The construct designated 1.76 CMV mu anti-CTLA-4 scFv-Fc results in the highest level of expression of the murine anti-CTLA-4 scFv-Fc, and the construct designated 1.76 CMV hu anti-CTLA-4 scFv-Fc results in the highest level of expression of the human anti-CTLA-4 scFv-Fc, when normalized by GFP co-transfection.

Measurement of STING Activity, IL-15Rα-IL-15c Concentration, and Anti-CTLA-4 scFv-Fc
Concentration, Normalized by GFP Co-Transfection, in HEK293T STING Null Cells

| | | | | | muIL-15Rα- | | | |
|---|---|---|---|---|---|---|---|---|
| | ISRE-SEAP | | IFNβ-Lucia ™ | | IL-15sc | | mu anti-CTLA-4 | |
| | (Abs) | | (RLUs) | | (Abs) | | scFv-Fc (Abs) | |
| Construct | Mean | ±SD | Mean | ±SD | Mean | ±SD | Mean | ±SD |

Mouse

| | | | | | | | | |
|---|---|---|---|---|---|---|---|---|
| Untransfected | 0 | 0 | 0 | 0 | 0 | 0 | 0 | 0 |
| 1.76 CMV β- | −1.71E−05 | 1.04E−05 | −0.01597 | 0.6049 | 0 | 0 | 0.002325 | 0.0004565 |
| Actin | | | | | | | | |
| 1.76 CMV | 1.45E−07 | 4.79E−06 | 0.07555 | 0.3292 | 947.4 | 164.1 | NA* | NA* |
| muIL-15Rα- | | | | | | | | |
| IL-15sc | | | | | | | | |
| 1.76 CMV | 4.07E−02 | 4.29E−03 | 18.25 | 1.27 | NA | NA | NA* | NA* |
| huSTING | | | | | | | | |
| N154S/R284G | | | | | | | | |
| tazCTT | | | | | | | | |
| 1.76 CMV | 3.79E−02 | 2.19E−04 | 28.47 | 1.523 | 996.8 | 364.6 | NA* | NA* |
| muIL-15Rα- | | | | | | | | |
| IL-15sc T2A | | | | | | | | |
| huSTING | | | | | | | | |
| N154S/R284G | | | | | | | | |
| tazCTT | | | | | | | | |
| 2.1 CMV | 4.73E−02 | 7.60E−03 | 7.145 | 0.8812 | 1636 | 287.9 | NA* | NA* |
| VCIP muIL- | | | | | | | | |
| 15Rα-IL-15sc | | | | | | | | |
| T2A | | | | | | | | |
| huSTING | | | | | | | | |
| N154S/R284G | | | | | | | | |
| tazCTT | | | | | | | | |
| 1.76 CMV mu | −1.54E−06 | 1.81E−05 | −0.6844 | 0.1614 | NA* | NA* | 0.03733 | 0.003862 |
| anti-CTLA-4 | | | | | | | | |
| scFv-Fc | | | | | | | | |
| 1.76 CMV mu | 3.51E−02 | 1.85E−04 | 3.225 | 0.2805 | 599.6 | 190.4 | 0.01676 | 0.00193 |
| anti-CTLA-4 | | | | | | | | |
| scFv-Fc T2A | | | | | | | | |
| muIL-15Rα- | | | | | | | | |
| IL-15sc P2A | | | | | | | | |
| huSTING | | | | | | | | |
| tazCTT | | | | | | | | |
| N154S/R284G | | | | | | | | |
| tazCTT | | | | | | | | |
| 2.1 CMV | 3.62E−02 | 1.26E−03 | 4.836 | 0.5915 | 610.1 | 230.7 | 0.01461 | 0.002674 |
| VCIP mu anti- | | | | | | | | |
| CTLA-4 | | | | | | | | |
| scFv-Fc T2A | | | | | | | | |
| muIL-15Rα- | | | | | | | | |
| IL-15sc P2A | | | | | | | | |
| huSTING | | | | | | | | |
| N154S/R284G | | | | | | | | |
| tazCTT | | | | | | | | |

Human

| | | | | | | | | |
|---|---|---|---|---|---|---|---|---|
| Untransfected | 0 | 0 | 0 | 0 | 0 | 0 | 0 | 0 |
| 1.76 CMV β- | −1.71E−05 | 1.04E−05 | −0.01597 | 0.6049 | 0 | 0 | 0.001643 | 0.00007734 |
| Actin | | | | | | | | |
| 1.76 CMV | −1.18E−05 | 9.34E−06 | 0.03296 | 0.1661 | 2407 | 4.101 | NA* | NA* |
| huIL-15Rα- | | | | | | | | |
| IL-15sc | | | | | | | | |
| 1.76 CMV | 4.07E−02 | 4.29E−03 | 18.25 | ±1.27 | NA* | NA* | NA* | NA* |
| huSTING | | | | | | | | |
| N154S/R284G | | | | | | | | |
| tazCTT | | | | | | | | |
| 1.76 CMV | 4.27E−02 | 3.76E−03 | 10.5 | 0.7221 | 1439 | 869.4 | NA* | NA* |
| huIL-15Rα- | | | | | | | | |
| IL-15sc T2A | | | | | | | | |
| huSTING | | | | | | | | |
| N154S/R284G | | | | | | | | |
| tazCTT | | | | | | | | |
| 2.1 CMV | 4.18E−02 | 4.63E−03 | 12.79 | 1.151 | 2758 | 235.1 | NA* | NA* |
| VCIP huIL- | | | | | | | | |
| 15Rα-IL-15sc | | | | | | | | |
| T2A | | | | | | | | |
| huSTING | | | | | | | | |
| N154S/R284G | | | | | | | | |
| tazCTT | | | | | | | | |
| 1.76 CMV hu | −8.73E−06 | 5.53E−06 | −0.333 | 0.04487 | NA* | NA* | 0.06436 | 0.006539 |
| anti-CTLA-4 | | | | | | | | |
| scFv-Fc | | | | | | | | |
| 1.76 CMV hu | 3.80E−02 | 1.32E−03 | 6.962 | 0.01366 | 2071 | 557.5 | 0.02265 | 0.001188 |
| anti-CTLA-4 | | | | | | | | |
| scFv-Fc T2A | | | | | | | | |
| huIL-15Rα- | | | | | | | | |
| IL-15sc P2A | | | | | | | | |
| huSTING | | | | | | | | |
| N154S/R284G | | | | | | | | |
| tazCTT | | | | | | | | |
| 2.1 CMV | 3.53E−02 | 3.25E−03 | 7.12 | 1.998 | 936.3 | 149.4 | 0.01687 | 0.0007017 |
| VCIP hu anti- | | | | | | | | |
| CTLA-4 | | | | | | | | |
| scFv-Fc T2A | | | | | | | | |
| huIL-15Rα- | | | | | | | | |
| IL-15sc P2A | | | | | | | | |
| huSTING | | | | | | | | |
| N154S/R284G | | | | | | | | |
| tazCTT | | | | | | | | |

*NA = Not applicable

### Example 37

### Expression Plasmids Encoding the Combination of huIL-15Rα-IL-15sc+huSTING N154S/R284G tazCTT

[1361] To identify the plasmid(s), with the highest expression of huIL-15Rα-IL-15sc and huSTING N154S/R284G tazCTT, plasmids containing nucleic acid molecules encoding huIL-15Rα-IL-15sc and/or huSTING N154S/R284G tazCTT, with different 2A peptides (e.g., T2A or P2A), and/or different post-transcriptional regulatory elements (e.g., HPRE or WPRE), and/or different poly(A) tails (e.g., bovine growth hormone poly(A) (bGHpA) or simian virus 40 poly(A) (SV40pA)), and/or containing the VCIP IRES, were cloned. Additionally, in some constructs, short peptide spacers, including RRKR and RAKR, and other spacers of different lengths, were encoded following the nucleic acid encoding the first payload (i.e., huIL-15Rα-IL-15sc), and before the nucleic acid encoding the 2A peptide. RRKR and RAKR are designed furin protease cleavage sites, and were placed in that position to facilitate proper processing of the 2A peptide sequences. The plasmids were first evaluated for expression and functionality by transfection in HEK293T STING Null Cells (ISG/KI-IFN (3) cells (InvivoGen).

[1362] HEK293T STING Null Cells (293-Dual™ Null Cells (ISG-SEAP/KI-[IFN-β]Lucia; InvivoGen), which do not contain endogenous STING, and express secreted embryonic alkaline phosphatase (SEAP), placed under the control of the endogenous IFN-stimulated response element (ISRE) promoter, where the coding sequence of ISRE is replaced by the SEAP ORF using knock-in technology, were used. As discussed above, the 293-Dual™ Null cells also express Lucia™ luciferase, a secreted luciferase, placed under the control of the endogenous IFN-β promoter, where the coding sequence of IFN-β has been replaced by the Lucia™ luciferase ORF using knock-in technology. The cells were seeded in 24-well plates coated with poly-L-lysine, at 200,000 cells per well, and incubated overnight at 37° C. in a 5% CO₂ incubator, to achieve 80% confluency. The following day, 300 ng of each plasmid DNA, and 40 ng of a CMV-GFP vector, were diluted in serum-free media and added to FuGENE® transfection reagent (Promega), at the proper reagent:DNA ratios, with untransfected wells serving as negative controls (in duplicates). Cell culture supernatants from each sample were collected 48 hours post-transfection for analysis.

[1363] The STING activity of the huSTING N154S/R284G tazCTT modified STING protein was evaluated with the HEK293T STING Null (ISG-SEAP/KI-[IFN-β]Lucia) reporter cell line (InvivoGen). Using these cells, the type I interferon (IFN) activity (that is induced by STING) is assessed by monitoring type I IFN-stimulated Lucia™ luciferase production in the cell supernatants. IFNβ induction is measured with the IFNβ-Lucia reporter. 20 μL of cell culture supernatant was added to 50 μL of QUANTI-Luc™ reagent (InvivoGen), which is used for measuring Lucia™ luciferase activity. Type I interferon activation was determined by measuring IFNβ-induced Lucia™ luciferase activity on a SpectraMax® M3 Spectrophotometer (Molecular Devices), on the luminescence setting. Cell culture supernatants also were assessed for the expression of human IL-15Rα-IL-15sc by ELISA (R&D), per kit instructions.

[1364] GFP was detected by flow cytometry, and the expression levels of GFP (as measured by fluorescence) were used to normalize the transfections to one other. 48 hours post-transfection, the cells were washed twice with PBS+2% FBS by centrifugation at 1300 RPM for 3 minutes. The cells then were resuspended in PBS+2% FBS with DAPI (dead/live stain). Flow cytometry data were acquired using the ACEA NovoCyte® flow cytometer (ACEA Biosciences, Inc.), and analyzed using the FlowJo™ software (Tree Star, Inc.).

[1365] As shown in the two tables below, the plasmid construct designated 2.1 CMV VCIP huIL-15Rα-IL-15sc_T2A_huSTING N154S/R284G tazCTT HPRE bGHpA resulted in the highest normalized luminescence value from the IFNβ-Lucia™ reporter (see, first table below), and also, the highest normalized concentration of expressed huIL-15Rα-IL-15sc, as determined by ELISA (see, second table below).

[1366] As shown in the first table below, the construct encoding only huIL-15Rα-IL-15sc (and no STING variant), as expected, does not exhibit STING-induced type I IFN activity. The construct encoding only the huSTING N154S/R284G tazCTT exhibits a high level of STING-induced type I IFN activity. For the constructs encoding both payloads, the combination of a P2A peptide with WPRE results in higher levels of STING activity (i.e., higher levels of expression of STING), than combinations of T2A and P2A with HPRE, or T2A with WPRE. Additionally, higher levels of STING activity were observed with constructs containing a bGH poly(A) tail, than an SV40 poly(A) tail. The addition of a short peptide spacer, such as RAKR or RRKR, slightly increases the level of STING activity, compared to the same constructs not containing these spacers. In certain constructs, such as those designated 2.1 CMV VCIP huIL-15Rα-IL-15sc_T2A_huSTING N154S/R284G tazCTT HPRE bGHpA; 2.1 CMV VCIP huIL-15Rα-IL-15sc P2A_huSTING N154S/R284G tazCTT HPRE bGHpA; 2.1 CMV VCIP huIL-15Rα-IL-15sc_T2A_huSTING N154S/R284G tazCTT WPRE bGHpA; 2.1 CMV VCIP huIL-15Rα-IL-15sc_T2A huSTING N154S/R284G tazCTT WPRE SV40pA; and 2.1 CMV VCIP huIL-15Rα-IL-15sc RAKR-T2A_huSTING N154S/R284G tazCTT HPRE bGHpA, the addition of a VCIP IRES increases the levels of STING activity, compared to the same constructs not containing the VCIP IRES.

[1367] As shown in the second table below, the expression levels of huIL-15Rα-IL-15sc are higher from constructs containing a bGH poly(A) tail, than an SV40 poly(A) tail, and in general, constructs containing WPRE result in higher expression levels of huIL-15Rα-IL-15sc than the same constructs containing HPRE. The addition of an RAKR short peptide spacer, after the nucleic acid sequence encoding huIL-15Rα-IL-15sc, in the construct encoding CMV huIL-15Rα-IL-15sc_T2A_huSTING N154S/R284G tazCTT HPRE bGHpA, increased the expression levels of huIL-15Rα-IL-15sc. In all constructs, except the one designated 2.1 CMV VCIP huIL-15Rα-IL-15sc P2A_huSTING N154S/R284G tazCTT HPRE SV40pA, the addition of a VCIP IRES (in addition to a 2A peptide) upstream of the construct, results in significantly increased expression of huIL-15Rα-IL-15sc. Replacement of the 2A peptide with a VCIP IRES, for example, in the construct designated 1.76 CMV huIL-15Rα-IL-15sc VCIP huSTING N154S/R284G tazCTT HPRE bGHpA, results in similar expression levels of huIL-15Rα-IL-15sc. Replacement of the 2A peptide with a VCIP IRES, and the addition of a longer spacer between the nucleic acids encoding huIL-15Rα-IL-15sc and the VCIP IRES, for example, in the construct designated 1.76 CMV huIL-15Rα-IL-15sc Longer spacer VCIP huSTING N154S/R284G tazCTT HPRE bGHpA, results in a significantly increased expression level of huIL-15Rα-IL-15sc. The spacer sequences in the constructs are nucleic acid sequences that are placed between the stop codon of the first ORF, and the VCIP IRES upstream of the second ORF. For example the spacer, designated “New spacer” in the tables below, has the sequence ACGTCTTCTCTTTTTAAAGGACCTCGTGAAATAAAAGTGC (SEQ ID NO:430), and the spacer, designated “Longer spacer” in the tables below, has the sequence

(SEQ ID NO: 431)
TCCGAGCCAAGTAAGGAGGTCCCTCTCTCTCTCTCCCCCCACGTCTTC
TCTTTTTAAAGGACCTCGTGAAATAAAAGTGC.

[1368] These results indicate that the addition of a VCIP IRES generally increases the expression levels of the first payload encoded on a bicistronic construct, and increases the expression levels of the second payload in certain constructs.

STING-Induced Type I IFN Activity, as Measured by Luminescence
Levels from the IFNβ-Lucia ™ Reporter, and Normalized by GFP
Co-Transfection, in Transfected HEK293T STING Null Cells

| | IFN-LuciaTM | |
|---|---|---|
| | Reporter | |
| | Luminescence (RLUs) | |
| Construct | Mean | SD |
| Untransfected control | 0 | 0 |
| 1.76 CMV huIL-15Rα-IL-15sc HPRE bGHpA | −0.7073 | ±0.05241 |
| 1.76 CMV huSTING N154S/R284G tazCTT HPRE bGHpA | 7.455 | ±0.7934 |
| 1.76 CMV huIL-15Rα-IL-15sc T2A huSTING N154S/R284G | 3.293 | ±0.8576 |
| tazCTT HPRE bGHpA | | |
| 1.76 CMV huIL-15Rα-IL-15sc P2A huSTING N154S/R284G | 3.758 | ±0.1993 |
| tazCTT HPRE bGHpA | | |
| 1.76 CMV huIL-15Rα-IL-15sc T2A huSTING | 3.867 | ±1.297 |
| N154S/R284G tazCTT WPRE bGHpA | | |
| 1.76 CMV huIL-15Rα-IL-15sc P2A huSTING | 8.716 | ±0.4241 |
| N154S/R284G tazCTT WPRE bGHpA | | |
| 1.76 CMV huIL-15Rα-IL-15sc T2A huSTING | 0.9444 | ±0.03282 |
| N154S/R284G tazCTT HPRE SV40pA | | |
| 1.76 CMV huIL-15Rα-IL-15sc P2A huSTING | 0.4778 | ±0.03872 |
| N154S/R284G tazCTT HPRE SV40pA | | |
| 1.76 CMV huIL-15Rα-IL-15sc T2A huSTING | 0.4436 | ±0.1342 |
| N154S/R284G tazCTT WPRE SV40pA | | |
| 1.76 CMV huIL-15Rα-IL-15sc P2A huSTING | 0.483 | ±0.07984 |
| N154S/R284G tazCTT WPRE SV40pA | | |
| 1.76 CMV huIL-15Rα-IL-15sc RAKR-T2A huSTING | 3.621 | ±0.5816 |
| N154S/R284G tazCTT HPRE bGHpA | | |
| 1.76 CMV huIL-15Rα-IL-15sc RRKR-T2A huSTING | 4.938 | ±0.6406 |
| N154S/R284G tazCTT HPRE bGHpA | | |
| 2.1 CMV VCIP huIL-15Rα-IL-15sc T2A huSTING | 9.356 | ±2.116 |
| N154S/R284G tazCTT HPRE bGHpA | | |
| 2.1 CMV VCIP huIL-15Rα-IL-15sc P2A huSTING | 4.065 | ±0.02317 |
| N154S/R284G tazCTT HPRE bGHpA | | |
| 2.1 CMV VCIP huIL-15Rα-IL-15sc T2A huSTING | 4.648 | ±1.199 |
| N154S/R284G tazCTT WPRE bGHpA | | |
| 2.1 CMV VCIP huIL-15Rα-IL-15sc P2A huSTING | 4.666 | ±0.8666 |
| N154S/R284G tazCTT WPRE bGHpA | | |
| 2.1 CMV VCIP huIL-15Rα-IL-15sc T2A huSTING | −0.2763 | ±0.4616 |
| N154S/R284G tazCTT HPRE SV40pA | | |
| 2.1 CMV VCIP huIL-15Rα-IL-15sc P2A huSTING | 0.2751 | ±0.2559 |
| N154S/R284G tazCTT HPRE SV40pA | | |
| 2.1 CMV VCIP huIL-15Rα-IL-15sc T2A huSTING | 0.8467 | ±0.0387 |
| N154S/R284G tazCTT WPRE SV40pA | | |
| 2.1 CMV VCIP huIL-15Rα-IL-15sc P2A huSTING | 0.3058 | ±0.3335 |
| N154S/R284G tazCTT WPRE SV40pA | | |
| 2.1 CMV VCIP huIL-15Rα-IL-15sc RAKR-T2A huSTING | 7.278 | ±0.6898 |
| N154S/R284G tazCTT HPRE bGHpA | | |
| 2.1 CMV VCIP huIL-15Rα-IL-15sc RRKR-T2A huSTING | 2.675 | ±0.2714 |
| N154S/R284G tazCTT HPRE bGHpA | | |
| 1.76 CMV huIL-15Rα-IL-15sc VCIP huSTING N154S/R284G | 0.5301 | ±0.09792 |
| tazCTT HPRE bGHpA | | |
| 1.76 CMV huIL-15Rα-IL-15sc New spacer* VCIP huSTING | 0.869 | ±0.04427 |
| N154S/R284G tazCTT HPRE bGHpA | | |
| 1.76 CMV huIL-15Rα-IL-15sc Longer spacer** VCIP | 1.241 | ±0.03473 |
| huSTING N154S/R284G tazCTT HPRE bGHpA | | |

SD = Standard deviation
*New spacer = ACGTCTTCTCTTTTTAAAGGACCTCGTGAAATAAAAGTGC
**Longer spacer = TCCGAGCCAAGTAAGGAGGTCCCTCTCTCTCTCTCCCCCCACGTCTTCTCTTTTTAAAGGACCTCGTGAAATAAAAGTGC

Concentration of Expressed huIL-15Rα-IL-15sc, as Measured by ELISA
and Normalized by GFP Co-Transfection, in Transfected HEK293T STING
Null Cells Fluorescence (Abs)

| Construct | Mean | SD |
|---|---|---|
| Untransfected control | 0 | 0 |
| 1.76 CMV huIL-15Rα-IL-15sc HPRE bGHpA | 1619 | ±18.53 |
| 1.76 CMV huSTING N154S/R284G tazCTT HPRE bGHpA | 12.04 | ±35.09 |
| 1.76 CMV huIL-15Rα-IL-15sc T2A huSTING N154S/R284G | 1586 | ±88.91 |
| tazCTT HPRE bGHpA | | |
| 1.76 CMV huIL-15Rα-IL-15sc P2A huSTING N154S/R284G | | |
| tazCTT HPRE bGHpA | 1906 | ±35.82 |
| 1.76 CMV huIL-15Rα-IL-15sc T2A huSTING | 2244 | ±477 |
| N154S/R284G tazCTT WPRE bGHpA | | |
| 1.76 CMV huIL-15Rα-IL-15sc P2A huSTING | | |
| N154S/R284G tazCTT WPRE bGHpA | 2056 | ±71.49 |
| 1.76 CMV huIL-15Rα-IL-15sc T2A huSTING | 40.33 | ±9.336 |
| N154S/R284G tazCTT HPRE SV40pA | | |
| 1.76 CMV huIL-15Rα-IL-15sc P2A huSTING | | |
| N154S/R284G tazCTT HPRE SV40pA | 268.9 | ±10.53 |
| 1.76 CMV huIL-15Rα-IL-15sc T2A huSTING | 324.5 | ±51.87 |
| N154S/R284G tazCTT WPRE SV40pA | | |
| 1.76 CMV huIL-15Rα-IL-15sc P2A huSTING | 397.7 | ±42.62 |
| N154S/R284G tazCTT WPRE SV40pA | | |
| 1.76 CMV huIL-15Rα-IL-15sc RAKR-T2A huSTING tazCTT | 1915 | ±16.64 |
| N154S/R284G HPRE bGHpA | | |
| 1.76 CMV huIL-15Rα-IL-15sc RRKR-T2A huSTING | 1093 | ±3.221 |
| N154S/R284G tazCTT HPRE bGHpA | | |
| 2.1 CMV VCIP huIL-15Rα-IL-15sc T2A huSTING | 2758 | ±114.5 |
| N154S/R284G tazCTT HPRE bGHpA | | |
| 2.1 CMV VCIP huIL-15Rα-IL-15sc P2A huSTING | 2457 | ±1.527 |
| N154S/R284G tazCTT HPRE bGHpA | | |
| 2.1 CMV VCIP huIL-15Rα-IL-15sc T2A huSTING | 3616 | ±202.8 |
| N154S/R284G tazCTT WPRE bGHpA | | |
| 2.1 CMV VCIP huIL-15Rα-IL-15sc P2A huSTING tazCTT | 2327 | ±199 |
| N154S/R284G WPRE bGHpA | | |
| 2.1 CMV VCIP huIL-15Rα-IL-15sc T2A huSTING tazCTT | 397.5 | ±148.8 |
| N154S/R284G HPRE SV40pA | | |
| 2.1 CMVVCIP huIL-15Rα-IL-15sc P2A huSTING | 184.3 | ±39.19 |
| N154S/R284G tazCTT HPRE SV40pA | | |
| 2.1 CMV VCIP huIL-15Rα-IL-15sc T2A huSTING | 551 | ±15.35 |
| N154S/R284G tazCTT WPRE SV40pA | | |
| 2.1 CMV VCIP huIL-15Rα-IL-15sc P2A huSTING | 662.9 | ±99.41 |
| N154S/R284G tazCTT WPRE SV40pA | | |
| 2.1 CMV VCIP huIL-15Rα-IL-15sc RAKR-T2A huSTING | 2553 | ±71.83 |
| N154S/R284G tazCTT HPRE bGHpA | | |
| 2.1 CMV VCIP huIL-15Rα-IL-15sc RRKR-T2A huSTING | 1919 | ±332.6 |
| N154S/R284G tazCTT HPRE bGHpA | | |
| 1.76 CMV huIL-15Rα-IL-15sc VCIP huSTING N154S/R284G | 1507 | ±97.77 |
| tazCTT HPRE bGHpA | | |
| 1.76 CMV huIL-15Rα-IL-15sc New spacer* VCIP huSTING | 1385 | ±28.04 |
| N154S/R284G tazCTT HPRE bGHpA | | |
| 1.76 CMV huIL-15Rα-IL-15sc Longer spacer** VCIP huSTING | | |
| N154S/R284G tazCTT HPRE bGHpA | 2648 | ±178.2 |

*New spacer = ACGTCTTCTCTTTTTAAAGGACCTCGTGAAATAAAAGTGC
**Longer spacer = TCCGAGCCAAGTAAGGAGGTCCCTCTCTCTCTCTCCCCCCACGTCTTCTCTTTTTAAAGGACCTCGTGAAATAAAAGTGC

[1369] The differences in the downstream IFN-β signaling, induced in human M2 macrophages by the different huIL-15Rα-IL-15sc and huSTING N154S/R284G tazCTT constructs, was determined. Nucleic acids encoding huIL-15Rα-IL-15sc and huSTING N154S/R284G tazCTT were cloned into vectors, with and without a VCIP IRES, placed before the start codon of either the huIL-15Rα-IL-15sc or huSTING N154S/R284G tazCTT coding sequences.

[1370] Frozen human monocytes, isolated from healthy human donors, were thawed in complete medium (RPMI-1640+10% FBS), and washed by centrifugation for 10 minutes at 600×g at room temperature. The monocytes were resuspended in ImmunoCult™-SF Macrophage Medium (StemCell Technologies), containing 100 ng/mL human M-CSF. The monocytes (5e5 cells per well) then were seeded in a 24-well plate with a final volume of 500 μL. Five days later, 250 μL of ImmunoCult™-SF Macrophage Medium (StemCell Technologies), containing 300 ng/mL human M-CSF+60 ng/mL human IL-4+60 ng/mL human IL-10, was added to each well, and the cells were incubated for 2 more days. On day 7, the cells were transfected using Viromer® RED mRNA and plasmid transfection reagent, according to the manufacturer's instructions. 750 ng of plasmid DNA, from a panel of different plasmid constructs, as well as a “no DNA” control (encoding secNanoLuc®), were diluted in the provided buffer, and mixed with Viromer® RED transfection reagent, and the mixture was incubated at room temperature for 15 minutes to allow the DNA/Viromer® RED complexes to form. The DNA/Viromer® RED complexes were then slowly added to each well of the 24-well plate (in triplicate), and the plate was incubated at 37° C. in a 5% CO₂ incubator. Cell culture supernatants were harvested at 48 hours, and were assayed for IFN-β using a human cytokine panel U-Plex assay (Meso Scale Discovery), according to the manufacturer's protocol. The average of three measurements was calculated, and background signal from the no DNA control was subtracted, to calculate the net IFN-β expression levels.

[1371] The results, which are summarized in the table below, show that the construct encoding only huIL-15Rα-IL-15sc (and no STING), does not induce any IFN-β expression in transfected human M2 macrophages. The construct that results in the highest level of IFN-β expression in transfected human M2 macrophages is the construct designated pATI2.1 CMV VCIP huIL-15Rα-IL-15sc_T2A_huSTING N154S/R284G tazCTT HPRE bGHpA. This construct (designated pATI2.1 CMV VCIP huIL-15Rα-IL-15sc_T2A_huSTING N154S/R284G tazCTT HPRE bGHpA) results in a higher level of IFN-β expression than constructs with the pATI1.76 backbone, and with no VCIP IRES at all, or with a VCIP IRES between the ORFs of huIL-15Rα-IL-15sc and huSTING N154S/R284G tazCTT (i.e., where the VCIP IRES replaces a 2A sequence). The construct designated pATI2.1 CMV VCIP huIL-15Rα-IL-15sc_T2A_huSTING N154S/R284G tazCTT HPRE bGHpA results in a higher IFN-β signal, compared to the corresponding construct containing a P2A sequence instead of a T2A sequence. These results indicate that bicistronic constructs, containing a VCIP IRES upstream of the two ORFs, and a 2A sequence, particularly T2A, between the two ORFs, result in higher expression levels of the second encoded payload.

Net Signal of IFN-β Protein Expression Following Transfection
of Human M2 Macrophages with Various Constructs

| | Net IFN-β | Standard |
|---|---|---|
| Construct | (pg/mL) | Deviation |
| pATI2.1 CMV VCIP secNanoLuc ® HPRE bGHpA | 0.00 | ±133.76 |
| pATI1.76 CMV huIL-15Rα-IL-15sc HPRE bGHpA | −411.92 | ±229.81 |
| pATI1.76 CMV huSTING N154S/R284G tazCTT HPRE | 2710.37 | ±579.12 |
| bGHpA | | |
| pATI1.76 CMV huIL-15Rα-IL-15sc T2A huSTING | −788.33 | ±139.87 |
| N154S/R284G tazCTT HPRE bGHpA | | |
| pATI2.1 CMV VCIP huIL-15Rα-IL-15sc T2A huSTING | 5505.08 | ±397.48 |
| N154S/R284G tazCTT HPRE bGHpA | | |
| pATI2.1 CMV VCIP huIL-15Rα-IL-15sc P2A huSTING | 1425.51 | ±62.06 |
| N154S/R284G tazCTT HPRE bGHpA | | |
| pATI1.76 CMV huIL-15Rα-IL-15sc VCIP huSTING | 1630.63 | ±709.30 |
| N154S/R284G tazCTT HPRE bGHpA | | |
| pATI1.76 CMV huIL-15Rα-IL-15sc New spacer* | 2014.95 | ±97.68 |
| VCIP huSTING tazCTT N154S/R284G HPRE bGHpA | | |
| pATI1.76 CMV huIL-15Rα-IL-15sc Longer spacer** | 385.71 | ±158.29 |
| VCIP huSTING N154S/R284G tazCTT HPRE bGHpA | | |

*New spacer = ACGTCTTCTCTTTTTAAAGGACCTCGTGAAATAAAAGTGC
**Longer spacer = TCCGAGCCAAGTAAGGAGGTCCCTCTCTCTCTCTCCCCCCACGTCTTCTCTTTTTAAAGGACCTCGTGAAATAAAAGTGC

### Example 38

### The Combination of Murine IL-15Rα-IL-15sc and huSTING N154S/R284G tazCTT, and the Combination Thereof with Murine Anti-CTLA-4 scFv-Fc, Induces the Secretion of CXCL10 from Myeloid Cells and Induces the Activation of T-Cells

[1372] The impact of the expression of the immunomodulatory payloads, and their combinations, on the activation and function of T-cells and myeloid cells, was evaluated. This example describes and demonstrates the impact of the delivery of various immunomodulatory payload combinations, by the immunostimulatory bacteria provided herein, on the activation of antigen-specific T-cells (in terms of CD25 expression and IFN-γ secretion), and on the secretion of CXCL10, a key chemokine involved in the recruitment of anti-tumor T-cells, by myeloid cells. The levels of secreted cytokines, such as IFN-γ, IFN-β, and CXCL10 (IP-10), were measured as correlates of protective anti-tumor immunity, and CD25 cell surface expression was monitored as a marker of T-cell activation. This was assessed by transfecting mouse bone-marrow derived dendritic cells (BMDCs) with plasmids encoding various combinations of payloads, co-culturing the transfected dendritic cells with autologous mouse T-cells, and then identifying the resulting cytokines.

[1373] The plasmids encoding the immunomodulatory payloads/proteins included those encoding single payloads, as well as those encoding combinations of payloads. For example, as shown in the table below, encoded payloads included murine (mu) IL-15Rα-IL-15sc (also referred to as IL-15/IL-15Rα complex, and IL-15cplex); a murine anti-CTLA-4 scFv-Fc (clone 9D9); and huSTING N154S/R284G tazCTT (a chimeric protein containing human STING with the GOF mutations N154S and R284G, and a replacement of the C-terminal tail (CTT) of human STING with the CTT of Tasmanian devil STING); and combinations thereof.

[1374] Combinations of payloads included two or three payloads, expressed on a single plasmid using T2A and/or P2A peptides, such that the proteins are encoded under the control of the same promoter. The combinations of payloads included: 1) murine IL-15Rα-IL-15sc and human STING N154S/R284G tazCTT; and 2) murine anti-CTLA-4 scFv-Fc, murine IL-15Rα-IL-15sc, and human STING N154S/R284G tazCTT.

[1375] Bone marrow-derived dendritic cells (BMDCs) were differentiated from Goldenticket mice, which are STING deficient, and the cells were transfected with plasmids encoding various combinations of the investigated payloads. Twenty-four hours post-transfection, cell supernatants were harvested, and the levels of secreted CXCL10 were measured in BMDC culture supernatants, using a U-Plex assay platform from Meso Scale Discovery, according to the manufacturer's protocol.

[1376] To measure CD8⁺ T-cell activation, transfected BMDCs were pulsed with chicken ovalbumin (OVA) SIINFEKL (OVA257-264) peptide, a major histocompatibility complex (MHC) class I (H-2Kb)-restricted peptide epitope recognized by CD8⁺ T-cells. Splenic T-cells, isolated from Rag1^{-/-} OT-I mice, which express T-cell receptors (TCRs) that are specific for SIINFEKL presented by the MHC class I molecule H-2Kb, were added to the BMDCs for co-culture. After 24 hours of BMDC/T-cell co-culture, supernatants were harvested, and the levels of secreted IFN-γ were measured using a U-Plex assay platform from Meso Scale Discovery, according to the manufacturer's protocol.

[1377] The co-cultured cells also were harvested, and CD8⁺ T-cells were stained with a phycoerythrin (PE)-conjugated murine anti-CD25 antibody (clone PC61, BioLegend), to determine the expression levels of the CD25 T-cell activation marker.

[1378] The results are summarized in the table below, which shows the levels of CXCL10 secreted by BMDCs in response to transfection with plasmids encoding various single and combination payloads, as well as the levels of IFN-γ secreted by CD8⁺ T-cells, and the levels of T-cell activation (in terms of CD25 expression), following co-culture with the transfected BMDCs.

[1379] The results show that huSTING N154S/R284G tazCTT alone induces very high levels of CXCL10 secretion by BMDCs. Combinations of murine IL-15Rα-IL-15sc with huSTING N154S/R284G tazCTT, or of murine anti-CTLA-4 scFv-Fc+murine IL-15Rα-IL-15sc+huSTING N154S/R284G tazCTT, also induce high levels of CXCL10 secretion by BMDCs.

[1380] The results also show exemplary combinations of encoded payloads that induce high levels of secretion of IFN-γ by human T-cells, and induce the activation (CD25 expression) of T-cells. An increased effect was observed with the combination of muIL-15Rα-IL-15sc and huSTING N154S/R284G tazCTT. The combination of muIL-15Rα-IL-15sc and huSTING N154S/R284G tazCTT also results in increased activation of CD8⁺ T-cell responses, and the expression of CD25. These results indicate that the delivery of the combination of IL-15Rα-IL-15sc and the modified STING chimera with a gain-of-function mutation or mutations and with a CTT replacement to reduce NF-κB signaling, to the tumor microenvironment, increases advantageous anti-tumor immune responses, and reduces undesirable inflammatory responses.

| | CXCL10 | | IFN-γ | | % CD25 | |
|---|---|---|---|---|---|---|
| | Secreted by | | Secreted by | | Expression on | |
| | BMDCs | | CD8⁺ T-Cells | | CD8⁺ | |
| BMDC Treatments | (pg/ml) | | (pg/ml) | | T-Cells | |
| (Transfections) | Mean | SEM | Mean | SEM | Mean | SEM |
| Untransfected control | 11 | 0 | 1102 | 70 | 17 | 3 |
| Beta-actin (plasmid control) | 159 | 18 | 1391 | 27 | 26 | 1 |
| muIL-15Rα-IL-15 sc | 286 | 43 | 1705 | 139 | 43 | 1 |
| muAnti-CTLA-4 scFv-Fc | 627 | 9 | 2182 | 87 | 41 | 7 |
| huSTING N154S/R284G tazCTT | 3612 | 62 | 2731 | 121 | 54 | 1 |
| muIL-15Rα-IL-15sc + | 2340 | 190 | 2973 | 246 | 70 | 21 |
| huSTING N154S/R284G tazCTT | | | | | | |
| muAnti-CTLA-4 scFv-Fc + | 1860 | 96 | 3098 | 165 | 51 | 2 |
| muIL-15Rα-IL-15sc + | | | | | | |
| huSTING N154S/R284G tazCTT | | | | | | |

SEM = Standard Error of the Mean

[1381] Delivery of this combination of encoded payloads, by the immunostimulatory bacteria provided herein, or by other delivery vehicles, such as oncolytic viruses or vectors, for expression of the payloads in tumor-resident myeloid cells and/or in the tumor microenvironment, provides for increased anti-tumor responses in the treated subject. As also shown in Examples below, the combination of a cytokine and a modified STING protein with a gain-of-function mutation, including the chimeras, results in additional advantageous anti-tumor responses in a treated subject.

### Example 39

### Human Recombinant IL-15, in Combination with a Small Molecule STING Agonist, Induces the Secretion of CXCL10 from Myeloid Cells, and Induces the Activation of T-Cells

[1382] This Example shows the impact of the expression of human immunomodulatory payloads, and their combinations, on the activation and function of T-cells and myeloid cells. The levels of secreted cytokines, such as IFN-γ and CXCL10 (IP-10), were measured as indicators of protective anti-tumor immunity. This Example describes and demonstrates the impact of the recombinant monomeric human IL-15 cytokine and 2′3′-c-di-AM(PS)2 (Rp, Rp), a small molecule STING (smSTING) agonist, on the secretion of CXCL10 by myeloid cells, a chemokine that is involved in the recruitment of anti-tumor T-cells, and on the secretion of IFN-γ by antigen-specific T-cells. The smSTING agonist is a cyclic dinucleotide (CDN) known to induce the production of type I interferons (IFNs) following its recognition by endoplasmic reticulum-resident STING. 2′3′-c-di-AM(PS)2 (Rp, Rp) is the Rp, Rp-isomer of the 2′3′-bisphosphorothioate analog of 3′3′-cyclic adenosine monophosphate (c-di-AMP). It has a higher affinity for STING than c-di-AMP, due to the presence of a 2′-5′, 3′-5′ mixed linkage. This analog contains two phosphorothioate diester linkages to protect it against degradation by phosphodiesterases that are present in host cells or in the systemic circulation. 2′3′-c-di-AM(PS)2 (Rp, Rp) strongly induces type I IFN and CXCL10 production in relevant cells.

[1383] Human monocyte-derived dendritic cells (ModDCs) and autologous human T-cells were co-cultured with the small molecule (smSTING) agonist and the recombinant IL-15, and the resulting secreted cytokines were identified. The human monocyte-derived dendritic cells (ModDCs) were differentiated from negatively isolated monocytes, using the ImmunoCult™ Dendritic Cell Culture Kit (STEMCELL Technologies), for 6 days, following the manufacturer's instructions. After 6 days of differentiation, ModDCs were pulsed with a pool of 32 MHC class I-restricted viral peptides from human cytomegalovirus (CMV), Epstein-Barr virus (EBV), and influenza virus (Flu) (extended CEF peptide pool for human CD8 T cells, MABTECH), before the addition of autologous CD8⁺ T-cells, and treatment with 2.5 nM of recombinant human IL-15 and/or 5 μg/ml of smSTING. Pulsing the dendritic cells with the viral peptides causes the dendritic cells to present the viral antigens on their cell surfaces, and stimulates antigen-specific T-cells to produce IFN-gamma. After 48 hours of ModDC/T-cell co-culture, the levels of secreted IFN-γ and CXCL10 were measured in the cell culture supernatants, using a U-Plex assay platform from Meso Scale Discovery, according to the manufacturer's protocol.

[1384] The results, which are summarized in the table below, show the additive effect of STING activation and human IL-15 activity on the secretion of CXCL10 by human dendritic cells upon antigen-specific stimulation. The results also show that the combination of STING activation and a cytokine, such as human IL-15, synergistically activates antigen-specific CD8⁺ T-cells, and induces high levels of IFN-γ secretion by the activated CD8⁺ T-cells.

| | | | IFN-γ Secreted | |
|---|---|---|---|---|
| | CXCL10 Secreted by | | by CD8⁺ | |
| | ModDCs (pg/ml) | | T-Cells (pg/ml) | |
| Treatments | Mean | SEM | Mean | SEM |
| Media (control) | 21337 | 1015 | 685 | 40 |
| smSTING (CDN) | 78407 | 3869 | 5185 | 654 |
| Recombinant human IL-15 | 38671 | 1052 | 35311 | 29713 |
| Recombinant human IL-15 + | 100673 | 3229 | 268328 | 17505 |
| smSTING (CDN) | | | | |

SEM = Standard Error of the Mean

### Example 40

### Combinations of Gain-of-Function STING Variants and Cytokines Enhance the Anti-Tumor Immune Response

### The Combination of Human IL-15Rα-IL-15sc and huSTING

[1385] N154S/R284G tazCTT Induces the Secretion of IFN-β from Myeloid Cells, and Induces the Activation of T-Cells

[1386] This Example demonstrates the impact of the encoded human immunomodulatory payloads, and their combinations, that are delivered for expression in the TME and/or in tumor-resident myeloid cells, on the activation and function of human T-cells and dendritic cells. The levels of cytokines secreted by the dendritic cells and the T-cells, such as IFN-γ and IFN-β, respectively, were measured as correlates of protective anti-tumor immunity. This example describes and demonstrates the impact of the delivery of various immunomodulatory payload combinations to the tumor microenvironment, such as by the immunostimulatory bacteria exemplified herein, and/or by other delivery vehicles described herein, on the activation of antigen-specific T-cells (as demonstrated by IFN-γ secretion), and on the secretion of IFN-β, a key factor involved in the anti-tumor immune response. This was achieved by transfecting human monocyte-derived dendritic cells (ModDCs) with plasmids encoding various combinations of payloads, co-culturing the transfected dendritic cells with autologous human T-cells, and identifying the cytokines secreted as a result. The plasmids encoding the immunomodulatory payloads/proteins included those encoding single payloads, and those encoding combinations of payloads. For example, as shown in the table below, the encoded payloads included huIL-15Rα-IL-15sc alone, huSTING N154S/R284G tazCTT alone, and the combination of huIL-15Rα-IL-15sc and huSTING N154S/R284G tazCTT.

[1387] Human monocyte-derived dendritic cells (ModDCs) were differentiated from negatively isolated monocytes using the ImmunoCult™ Dendritic Cell Culture Kit (STEMCELL Technologies) for 6 days, following the manufacturer's instructions. After 6 days of differentiation, ModDCs were transfected with plasmids encoding the various investigated payloads and combinations thereof, using the Viromer® RED mRNA and plasmid DNA transfection reagent (Origene). Four hours post-transfection, the ModDCs were pulsed with a pool of 32 MHC class I-restricted viral peptides from human cytomegalovirus (CMV), Epstein-Barr virus (EBV), and influenza virus (Flu) (extended CEF peptide pool for human CD8 T cells, MABTECH), before the addition of autologous CD8⁺ T-cells to the cell culture. The transfected dendritic cells also were pulsed with an irrelevant peptide from the Human Immunodeficiency virus 1 (HIV-1) reverse transcriptase, and used as a negative control for the peptide stimulation of T-cells. CD8⁺ T-cells from HIV-1 negative donors were used. After 48 hours of ModDC/T-cell co-culture, the levels of IFN-γ secreted by the T-cells were measured in the cell culture supernatants, using a U-Plex assay platform from Meso Scale Discovery, according to the manufacturer's protocol.

[1388] In a separate experiment, ModDCs were transfected with plasmids encoding the various investigated payloads and combinations thereof, using the Viromer® RED mRNA and plasmid DNA transfection reagent (Origene), and cultured for forty-eight hours. Cell culture supernatants from the transfected ModDCs were harvested forty-eight hours post-transfection, and the levels of secreted IFN-β were measured using a U-Plex assay platform from Meso Scale Discovery, according to the manufacturer's protocol. In order to analyze the impact of the encoded payloads on the secretion of IFN-β by the human dendritic cells, the concentration of IFN-β measured for the plasmid control group (Beta-actin) was subtracted from all the other groups in the study, providing the net IFN-β concentrations resulting only from the activities of the encoded payloads.

[1389] The results, which are summarized in the table below, show the synergistic effect of the combination of huIL-15Rα-IL-15sc and huSTING N154S/R284G tazCTT activities on the secretion of IFN-β by human dendritic cells. The results also show the combined effects of huIL-15Rα-IL-15sc and huSTING N154S/R284G tazCTT, which are at least additive, on the activation of antigen-specific CD8⁺ T-cells, and the induction of high levels of secreted IFN-γ from the activated T-cells.

| | Net IFN-β | IFN-γ Secreted by CD8⁺ T- | | | |
|---|---|---|---|---|---|
| | Secreted by | Cells (pg/ml) | | | |
| ModDC Treatments | ModDCs (pg/ml) | HIV Peptides | | CEF Peptides | |
| (Transfections) | Mean | Mean | SEM | Mean | SEM |
| Untransfected control | 0 | 205 | 62 | 1661 | 169 |
| Beta-actin (plasmid control) | 0 | 7639 | 2422 | 18252 | 619 |
| huSTING N154S/R284G tazCTT | 647 | 11746 | 825 | 31452 | 3280 |
| huIL-15Rα-IL-15sc | 226 | 10670 | 2397 | 39245 | 6439 |
| huIL-15Rα-IL-15sc + | 1281 | 16953 | 3595 | 42942 | 8083 |
| huSTING N154S/R284G tazCTT | | | | | |

SEM = Standard Error of the Mean

[1390] It is shown in the next Example, that the combined effects of the encoded payloads lead to synergistic results, as evidenced by the cures observed in mouse models of cancer.

### Example 41

### Combinations of muIL-15Rα-IL15sc, huSTING N154S/R284G tazCTT, and Murine Anti-CTLA-4 scFv-Fc, Demonstrate Superior Anti-Tumor Efficacy in a Highly Refractory Mouse Model of Triple Negative Breast Cancer

[1391] The synergistic effects observed in the Example above (Example 40), are further shown in this Example, which shows that the combinations of payloads act synergistically in effecting cures. Various payload combinations were evaluated for in vivo efficacy in an orthotopic, T-cell excluded, and metastatic model of CPI (immune checkpoint inhibitor) refractory triple-negative breast cancer. For this experiment, 6-8 week-old female BALB/c mice (8 mice per group) were inoculated in the left mammary fat pad with EMT6 tumor cells (ATCC® CRL-2755™) (1×10⁶ cells in 100 PBS). Mice bearing 7 day-old established mammary tumors (˜65 mm³ in volume) were intravenously (IV) injected with a single dose of 1×10⁷ CFUs of strains of YS1646Δasd/ΔFLG/ΔpagP/ΔansB/ΔcsgD containing plasmids encoding the various payloads, alone, or in combination with weekly intraperitoneal (IP) injections of 100 μg of the anti-PD-L1 antibody atezolizumab. The YS1646Δasd/ΔFLG/ΔpagP/ΔansB/ΔcsgD strains contained plasmids encoding muIL-15Rα-IL15sc+huSTING N154S/R284G tazCTT, or muIL-15Rα-IL15sc+huSTING N154S/R284G tazCTT+muAnti-CTLA-4 scFv-Fc, or the control plasmid encoding β-actin, and were compared to treatment with PBS control.

[1392] The results are summarized in the table below. The tumors in the PBS-treated mice grew evenly, reaching a max tumor volume at day 31. Treatment of mice with the control β-actin plasmid did not demonstrate much evidence of anti-tumor efficacy (5% tumor growth inhibition (TGI), 2/8 cures), nor did treatment with IP anti-PD-L1 alone (17.9% TGI, 1/8 cures). Mice that were IV treated with the bacterial strain containing a plasmid encoding muIL-15Rα-IL15sc+huSTING N154S/R284G tazCTT demonstrated monotherapy efficacy (59.8% TGI, 3/8 cures), which improved with the combination of IP anti-PD-L1 (77.3% TGI, 5/8 cures). The combination of muIL-15Rα-IL15sc+huSTING N154S/R284G tazCTT+muAnti-CTLA-4 scFv-Fc also demonstrated significant monotherapy efficacy (62.4% TGI, 4/8 cures). The therapeutic payload combinations were very well tolerated, and mice did not lose weight during the study. These data demonstrate the in vivo potency of IV administered immunostimulatory bacteria encoding the combinations of muIL-15Rα-IL15sc+huSTING N154S/R284G tazCTT, alone, or enhanced with IP administered anti-PD-L1, and muIL-15Rα-IL15sc+huSTING N154S/R284G tazCTT+muAnti-CTLA-4 scFv-Fc, in an orthotopic, T-cell excluded, and metastatic model of checkpoint inhibitor refractory triple-negative breast cancer (TNBC).

Effects of Combinations of Encoded Payloads, Delivered
by Immunostimulatory Bacteria, with and without addition
of IP Anti-PD-L1, on the Inhibition of Tumor Growth
and on the Cure Rates of Mice with Checkpoint Inhibitor
Refractory Triple-Negative Breast Cancer

| Encoded Payload(s) and Anti-PD-L1 | Tumor Growth | |
|---|---|---|
| Treatments | Inhibition (TGI) | Cures |
| Beta-actin (plasmid control) | 5% | 2/8 |
| Intraperitoneal (IP) Anti-PD-L1 alone | 17.9% | 1/8 |
| muIL-15Rα-IL15sc + | 59.8% | 3/8 |
| huSTING N154S/R284G tazCTT | | |
| muIL-15Rα-IL15sc + | 77.3% | 5/8 |
| huSTING N154S/R284G tazCTT + | | |
| IP Anti-PD-L1 | | |
| muIL-15Rα-IL15sc + | 62.4% | 4/8 |
| huSTING N154S/R284G tazCTT + | | |
| muAnti-CTLA-4 scFv-Fc | | |

[1393] A follow-up study was performed to evaluate the efficacy of higher doses of the muIL-15Rα-IL15sc+huSTING N154S/R284G tazCTT combination therapy, and for comparison with the efficacies of individually administered muIL-15Rα-IL15sc and huSTING N154S/R284G tazCTT. Strains of YS1646Δasd/ΔFLG/ΔpagP/ΔansB/ΔcsgD, containing plasmids encoding muIL-15Rα-IL15sc, huSTING N154S/R284G tazCTT, or the combination thereof, were administered intravenously (IV), at a dose of 3e7 CFUs, to mice bearing 7 day-old established mammary tumors, and were compared to PBS control. The tumors in the PBS-treated mice grew evenly, reaching a maximum tumor volume at day 31. As shown in the table below, mice treated with the bacterial strain containing a plasmid encoding muIL-15Rα-IL15sc or huSTING N154S/R284G tazCTT alone demonstrated 2/10 cures each, whereas the combination of muIL-15Rα-IL15sc+huSTING N154S/R284G tazCTT resulted in 7/10 cures.

| Encoded Payload(s) | Cures |
|---|---|
| PBS Control | 0/10 cures |
| muIL-15Rα-IL15sc | 2/10 cures |
| huSTING N154S/R284G tazCTT | 2/10 cures |
| muIL-I5Rα-IL15sc + huSTING N154S/R284G tazCTT | 7/10 cures |

[1394] These data show the synergistic potency of combinations of a cytokine and a modified STING protein, such as the combination of muIL-15Rα-IL15sc+huSTING N154S/R284G tazCTT, for promoting complete responses. It is particularly significant, since these results were achieved in a highly refractory model of breast cancer, which highlights the general anti-tumor therapeutic potency of the combination. These results indicate the synergistic anti-tumor potency of the combination of a cytokine, such as the IL-15Rα-IL15sc fusion protein, and a STING protein, particularly a highly active STING protein, such as a gain-of-function constitutively active STING variant, or a gain-of-function constitutively active STING variant that is further modified to have reduced NF-κB signaling. Cured mice from the muIL-15Rα-IL15sc+huSTING N154S/R284G tazCTT combination treatment groups (described above) then were evaluated for the ability to promote durable anti-tumor immunity in an orthotopic EMT6 tumor re-challenge study, and in a CD8⁺ T-cell dependent manner. For this study, 20 cured mice were divided into two groups of 10 mice each, and each mouse received IP injections of either 100 μg of an anti-CD8β antibody (which does not deplete CD8α⁺ dendritic cells), or 100 μg of an IgG isotype control, on days 3 and 1 prior to tumor re-challenge (day 56 and day 58 post-initial tumor implantation, respectively). The mice were bled prior to tumor re-challenge to confirm CD8⁺ T-cell depletion, and average circulating CD8⁺ T-cells were determined to be 5.72% for the isotype control, and 0.48% for the anti-CD8β antibody. The mice were then re-challenged with 1e6 EMT6 tumor cells, orthotopically on the opposite mammary fat pad, and compared to naïve, age-matched control mice (N=10). Mice from the naïve group all grew tumors to maximum tumor volume by day 30. Re-challenged mice from the anti-CD8β antibody-depleted group grew tumors even more aggressively than the naïve mice, whereas all 10 re-challenged mice from the IgG isotype antibody control group (i.e., mice without CD8⁺ T-cell depletion) were protected from tumor re-challenge. These data demonstrate the significant and durable anti-tumor efficacy of the combination of a cytokine and a modified gain-of-function constitutively active STING protein variant, such as when delivered in an immunostimulatory bacterium, such as a strain of YS1646Δasd/ΔFLG/ΔpagP/ΔansB/ΔcsgD bacteria, comprising plasmids encoding a combination of muIL-15Rα-IL15sc+huSTING N154S/R284G tazCTT. The combination of therapeutic payloads/proteins induces a high cure rate after IV administration of the bacteria, and mice are protected from tumor re-challenge in a CD8⁺ T-cell dependent manner.

### Example 42

### Immunomodulatory Strains Containing Human IL-15Rα-IL-15sc and huSTING N154S/R284G tazCTT Colonize Autochthonous Murine Tumors

[1395] It previously has been reported that the attenuated Salmonella strain YS1646 is able to colonize tumors in the 4T1 murine breast transplant model (average tumor size 400 mm³, average CFUs/g=10⁸), but is significantly less able to colonize the spontaneous BALB-NeuT breast tumor model (average tumor size 400 mm³, average CFUs/g=10³; see, e.g., Drees et al. (2015) J. Cancer 6(9):843-848).

[1396] In order to show that the immunostimulatory bacteria provided herein do not have a similar deficiency in colonizing spontaneous tumors compared to transplanted tumors, tumors were collected from the orthotopically-transplanted EMT6 mouse model of breast cancer, and compared to tumors collected from the spontaneous MMTV-PyMT breast cancer model. For the EMT6 model, 6-8 week-old female BALB/c mice (5 mice per group) were inoculated orthotopically in the 4^{th} mammary fat pad with EMT6 cells (1×10⁶ cells in 100 μL PBS). Mice bearing 7-day established flank tumors (average tumor size of 56 mm³) were IV injected with a single dose of 3×10⁷ CFUs of the YS1646Δasd/ΔFLG/ΔpagP/ΔansB/ΔcsgD strain, containing a plasmid encoding the combination of huIL-15Rα-IL-15sc+huSTING N154S/R284G tazCTT. At day 4 post-IV dosing, mice were euthanized, and tumors were homogenized and plated on LB plates to enumerate the number of colony forming units (CFUs) per gram of tumor tissue. The YS1646Δasd/ΔFLG/ΔpagP/ΔansB/ΔcsgD strain colonized tumors at a mean of 1.7×10⁷ CFUs per gram of tumor tissue.

[1397] For the spontaneous model of breast cancer, MMTV-PyMT mice were IV injected with 3×10⁷ CFUs of the same bacterial strain when their largest tumors measured an average of 272 mm³ in volume. Tumors were collected at day 6 post-IV dosing. Tumors were homogenized and plated on LB plates to enumerate the number of CFUs per gram of tumor tissue. All tumors collected were found to be well colonized despite a range of tumor weights (0.05 g to 0.36 g, N=7), with a mean of 2.89×10⁶ CFUs/g. These data demonstrate that, unlike the parental YS1646 strain, the immunomodulatory YS1646Δasd/ΔFLG/ΔpagP/ΔansB/ΔcsgD strain, containing the plasmid encoding the combination of huIL-15Rα-IL-15sc+huSTING N154S/R284G tazCTT, was able to colonize spontaneous MMTV-PyMT tumors at a comparable level to the transplanted EMT6 tumors (P=0.18, NS).

[1398] Since, unlike the transplanted tumors, the spontaneous tumors have vasculature that is more comparable to human tumors, these data indicate that the immunostimulatory bacteria will colonize human tumors at a much higher rate/level than the parental YS1646 strain was reported to in a phase I clinical trial of advanced cancer patients (see, e.g., Toso et al. (2002) J. Clin. Oncol. 20(1):142-152).

### Example 43

### Immunomodulatory Bacterial Strains, Containing Plasmids Encoding Human IL-15Rα-IL-15sc and huSTING N154S/R284G tazCTT, or a NanoLuciferase® Luciferase Control Plasmid, are Well Tolerated in Non-Human Primates

[1399] It had previously been reported, in a phase I human clinical trial, that the maximum tolerated dose (MTD) of the parental YS1646 strain is 3×10⁸ CFUs/m², and that the dose-limiting toxicity (DLT) dose was 1×10⁹ CFUs/m² (see, e.g., Toso et al. (2002) J. Clin. Oncol. 20(1):142-152). At these doses, the toxicities and adverse events, such as fever, hypotension, thrombocytopenia, anemia, vomiting, diarrhea, nausea, and hypophosphatemia, were attributed to very high serum levels of pro-inflammatory cytokines, measured at 4 hours post-IV dosing, including TNF-α (approximately 500,000 pg/mL), IL-6 (approximately 500,000 pg/mL), and IL-10 (approximately 200 pg/mL). In a separate study, strain YS1646 was evaluated in a non-human primate (NHP) study using cynomolgus monkeys. In this study, 1×10⁹ CFUs/monkey was found to be the MTD (Human Equivalent Dose (HED)=4×10⁹ CFUs/m²), while a dose of 1×10¹⁰ CFUs/monkey was considered not tolerated (HED=4×10¹⁰ CFUs/m²). DLTs at the top dose were attributed to liver-associated adverse events (AEs), and serum cytokines were not measured (see, e.g., Lee et al. (2000) International Journal of Toxicology 19:19-25). Since the NHPs tolerated strain YS1646 much better than the humans, with an MTD value of a log higher than the human MTD, it can be inferred that the cytokine levels of the monkeys would be approximately a log lower than those measured in humans.

[1400] To determine the MTD and serum cytokine profile of the immunostimulatory bacteria provided herein, such as strains that lack flagella and that are msbB⁻/pagP⁻, in NHPs, a tolerability study was performed. For this study, 15 previously untreated male cynomolgus monkeys, with ages ranging from 24 to 50 months, were utilized. The NHPs were IV administered the YS1646Δasd/ΔFLG/ΔpagP/ΔansB/ΔcsgD/F-ΔpurI strain (discussed above), containing a plasmid encoding the combination of huIL-15Rα-IL-15sc+huSTING N154S/R284G tazCTT, at doses of 3×10⁸ CFUs/monkey, 1×10⁹ CFUs/monkey, or 3×10⁹ CFUs/monkey (3 NHPs per dosing group), or were IV administered the YS1646Δasd/ΔFLG/ΔpagP/ΔansB/ΔcsgD strain, containing a plasmid encoding NanoLuciferase® luciferase, at a dose of 3×10⁸ CFUs/monkey (3 NHPs per group), and compared to the saline vehicle control group (N=3). The NHPs were bled prior to dosing, 4 hours post-dosing, and 24 hours post-dosing, and serum cytokine levels were measured using a monkey cytokine U-Plex panel (Meso Scale Discovery), according to the manufacturer's protocol.

[1401] The results, which are summarized in the tables below, show that the bacterial strains were well-tolerated at all dose levels tested, and no clinical findings were reported that differed significantly from the saline (PBS) control group. Thus, no MTD could be established in this study. Serum cytokine levels were very low overall, particularly for the cytokines that were attributed to dose-limiting toxicities (DLTs) in the human clinical trial with strain YS1646, such as the cytokines measured 4 hours post-IV dosing in the 3×10⁹ CFUs/monkey dose group (HED=1.2×10¹⁰ CFUs/m²), including TNF-α (mean concentration of 4.6 pg/mL), IL-6 (mean concentration of 376.9 pg/mL), and IL-10 (mean concentration of 0.88 pg/mL). Only the serum cytokine levels of IP-10/CXCL10 (mean concentration of 10,549.6 pg/mL) and MCP-1/CCL2 (mean concentration of 6247.7 pg/mL) were high in the top dose level group, 4 hours post-dosing, and remained elevated at 24 hours post-dosing. These analytes are not associated with toxicity, and can indicate a more favorable immune profile. In summary, the immunostimulatory bacteria provided herein, including those containing plasmids encoding payloads, are very well-tolerated in NHPs. It can thus be inferred, from these data, that there will be a high level of tolerability of the immunostimulatory bacterial strains in humans.

Serum Cytokines Levels Prior to Dosing

| | | Immunostimulatory Bacterial Strain and Dose (CFUs/NHP) | | | | |
|---|---|---|---|---|---|---|
| | | | | | | YS1646Δasd/ |
| | | | YS1646Δasd/ΔFLG/ΔpagP/ΔansP/ΔcsgD/ | | | ΔFLG/ΔpagP/ |
| | | | F-ΔpurI + p2.1 CMV VCIP huIL-15Rα- | | | ΔansB/ΔcsgD + |
| | | | IL15sc_T2A_STING N154S/R284G | | | NanoLuc ® |
| | | PBS | tazCTT | | | Plasmid |
| | | Control | 3 × 10⁸ | 1 × 10⁹ | 3 × 10⁹ | 3 × 10⁸ |
| | | — | CFUs/NHP | CFUs/NHP | CFUs/NHP | CFUs/NHP |
| IFN-γ | Mean | 3.87 | 0.24 | 0.80 | 3.78 | 0.00 |
| | (pg/ml) | | | | | |
| | ±SD | 0.00 | 0.00 | 0.78 | 0.00 | 0.00 |
| IL-10 | Mean | 0.08 | 0.03 | 0.05 | 0.09 | 0.08 |
| | (pg/ml) | | | | | |
| | ±SD | 0.06 | 0.02 | 0.03 | 0.02 | 0.02 |
| IL-12p70 | Mean | 0.56 | 0.32 | 1.43 | 1.23 | 0.30 |
| | (pg/ml) | | | | | |
| | ±SD | 0.27 | 0.16 | 1.87 | 1.08 | 0.21 |
| IL-1β | Mean | 0.08 | 0.05 | 0.70 | 0.09 | 0.26 |
| | (pg/ml) | | | | | |
| | ±SD | 0.00 | 0.05 | 1.15 | 0.12 | 0.00 |
| IL-2 | Mean | 0.00 | 2.29 | 0.00 | 17.32 | 0.00 |
| | (pg/ml) | | | | | |
| | ±SD | 0.00 | 0.00 | 0.00 | 0.00 | 0.00 |
| IL-6 | Mean | 0.38 | 0.41 | 1.01 | 2.56 | 0.79 |
| | (pg/ml) | | | | | |
| | ±SD | 0.23 | 0.17 | 0.14 | 4.10 | 0.47 |
| IP-10 | Mean | 605.50 | 639.54 | 813.35 | 766.50 | 684.53 |
| | (pg/ml) | | | | | |
| | ±SD | 154.57 | 54.59 | 248.99 | 297.89 | 46.50 |
| MCP-1 | Mean | 361.83 | 249.90 | 284.35 | 275.21 | 268.46 |
| | (pg/ml) | | | | | |
| | ±SD | 11.71 | 28.90 | 65.43 | 210.65 | 65.80 |
| TNF-α | Mean | 0.33 | 0.41 | 0.83 | 0.37 | 0.45 |
| | (pg/ml) | | | | | |
| | ±SD | 0.15 | 0.48 | 0.55 | 0.13 | 0.00 |

SD = standard deviation

Serum Cytokine Levels, 4 Hours After Dosing

| | | Immunostimulatory Bacterial Strain and Dose (CFUs/NHP) | | | | |
|---|---|---|---|---|---|---|
| | | | | | | YS1646Δasd/ |
| | | | YS1646Δasd/ΔFLG/ΔpagP/ΔansB/ΔcsgD/ | | | ΔFLG/ΔpagP/ |
| | | | F-ΔpurI + p2.1 CMV VCIP huIL-15Rα- | | | ΔansB/ΔcsgD + |
| | | | IL15sc_T2A_STING N154S/R284G | | | NanoLuc ® |
| | | PBS | tazCTT | | | Plasmid |
| | | Control | 3 × 10⁸ | 1 × 10⁹ | 3 × 10⁹ | 3 × 10⁸ |
| | | — | CFUs/NHP | CFUs/NHP | CFUs/NHP | CFUs/NHP |
| IFN-γ | Mean | 1.35 | 6.87 | 26.49 | 22.62 | 4.03 |
| | (pg/ml) | | | | | |
| | ±SD | 1.09 | 5.48 | 34.96 | 21.59 | 2.51 |
| IL-10 | Mean | 0.068 | 0.481 | 0.508 | 0.586 | 0.387 |
| | (pg/ml) | | | | | |
| | ±SD | 0.050 | 0.149 | 0.125 | 0.269 | 0.113 |
| IL-12p70 | Mean | 0.05 | 0.52 | 1.21 | 1.17 | 0.45 |
| | (pg/ml) | | | | | |
| | ±SD | 0.01 | 0.36 | 1.03 | 1.12 | 0.06 |
| IL-1β | Mean | 0.08 | 0.34 | 0.55 | 0.88 | 0.33 |
| | (pg/ml) | | | | | |
| | ±SD | 0.04 | 0.14 | 0.16 | 0.62 | 0.13 |
| IL-2 | Mean | 0.00 | 0.52 | 0.11 | 10.33 | 0.00 |
| | (pg/ml) | | | | | |
| | SD | 0.00 | 0.00 | 0.00 | 11.24 | 0.00 |
| IL-6 | Mean | 3.0 | 95.3 | 116.7 | 376.9 | 34.8 |
| | (pg/ml) | | | | | |
| | ±SD | 1.4 | 105.3 | 70.7 | 318.1 | 26.4 |
| IP-10 | Mean | 363.0 | 9529.3 | 11838.7 | 10549.6 | 11143.2 |
| | (pg/ml) | | | | | |
| | ±SD | 19.6 | 4596.6 | 82.0 | 2362.7 | 1231.4 |
| MCP-1 | Mean | 475.5 | 5017.5 | 5642.4 | 6247.7 | 3700.4 |
| | (pg/ml) | | | | | |
| | ±SD | 143.0 | 3755.6 | 1622.2 | 2492.8 | 2209.3 |
| TNF-α | Mean | 0.1 | 1.8 | 3.4 | 4.6 | 1.1 |
| | (pg/ml) | | | | | |
| | ±SD | 0.1 | 1.5 | 0.2 | 4.1 | 0.5 |

SD = standard deviation

Serum Cytokine Levels, 24 Hours After Dosing

| | | Immunostimulatory Bacterial Strain and Dose (CFUs/NHP) | | | | |
|---|---|---|---|---|---|---|
| | | | | | | YS1646Δasd/ |
| | | | YS1646Δasd/ΔFLG/ΔpagP/ΔansB/ΔcsgD/ | | | ΔFLG/ΔpagP/ |
| | | | F-ΔpurI + p2.1 CMV VCIP huIL-15Rα- | | | ΔansB/ΔcsgD + |
| | | | IL15sc_T2A_STING N154S/R284G | | | NanoLuc ® |
| | | PBS | tazCTT | | | Plasmid |
| | | Control | 3 × 10⁸ | 1 × 10⁹ | 3 × 10⁹ | 3 × 10⁸ |
| | | — | CFUs/NHP | CFUs/NHP | CFUs/NHP | CFUs/NHP |
| IFN-γ | Mean | 0.71 | 0.79 | 1.65 | 3.32 | 6.63 |
| | (pg/ml) | | | | | |
| | ±SD | 0.83 | 0.51 | 2.15 | 3.13 | 0.97 |
| IL-10 | Mean | 0.0577 | 0.0906 | 0.0672 | 0.0988 | 0.1000 |
| | (pg/ml) | | | | | |
| | ±SD | 0.0362 | 0.0428 | 0.0629 | 0.0631 | 0.0617 |
| IL-12p70 | Mean | 0.25 | 0.35 | 0.98 | 2.51 | 0.31 |
| | (pg/ml) | | | | | |
| | ±SD | 0.03 | 0.22 | 1.38 | 2.50 | 0.11 |
| IL-1β | Mean | 0.02 | 0.02 | 0.36 | 0.15 | 0.09 |
| | (pg/ml) | | | | | |
| | ±SD | 0.02 | 0.00 | 0.57 | 0.04 | 0.03 |
| IL-2 | Mean | 0.00 | 0.00 | 0.00 | 3.19 | 0.00 |
| | (pg/ml) | | | | | |
| | ±SD | 0.00 | 0.00 | 0.00 | 0.00 | 0.00 |
| IL-6 | Mean | 0.6 | 8.0 | 5.3 | 19.8 | 3.0 |
| | (pg/ml) | | | | | |
| | ±SD | 0.2 | 1.9 | 3.0 | 17.4 | 0.7 |
| IP-10 | Mean | 475.6 | 1579.7 | 2354.0 | 3638.2 | 2762.1 |
| | (pg/ml) | | | | | |
| | ±SD | 180.7 | 339.5 | 1475.8 | 4036.5 | 1752.8 |
| MCP-1 | Mean | 266.5 | 340.1 | 258.2 | 525.7 | 393.1 |
| | (pg/ml) | | | | | |
| | ±SD | 5.9 | 39.9 | 41.2 | 285.5 | 270.7 |
| TNF-α | Mean | 0.1 | 0.2 | 0.4 | 0.4 | 0.5 |
| | (pg/ml) | | | | | |
| | ±SD | 0.1 | 0.0 | 0.3 | 0.2 | 0.6 |

SD = standard deviation

[1402] Since modifications will be apparent to those of skill in the art, it is intended that this invention be limited only by the scope of the appended claims.

What is claimed:

1. A modified Stimulator of Interferon Genes (STING) protein, comprising at least two amino acid modifications, wherein:
each modification results in a STING protein that has constitutive activity in inducing type I interferon (IFN);
the modifications are insertions, deletions, and/or replacements of amino acids; and
the modified STING protein constitutive induces expression of type I IFN.

2. The modified STING protein of claim 1 that also has lower nuclear factor kappa-light-chain-enhancer of activated B cell (NF-κB) signaling activity, compared to the NF-κB signaling activity of human STING.

3. The modified STING protein of claim 1, wherein:
the unmodified STING protein is from a non-human species; and
the non-human STING is one that has lower nuclear factor kappa-light-chain-enhancer of activated B cell (NF-κB) signaling activity compared to the NF-κB signaling activity of human STING.

4. The modified STING protein of claim 1 that further includes a deletion of the TRAF6 binding site.

5. The modified STING protein of claim 1, wherein the STING protein is a chimera that comprises a human STING protein in which the C-terminal tail (CTT) region is replaced with the CTT from a non-human STING protein that has a lower NF-κB signaling activity than the NF-κB signaling activity of human STING.

6. The modified STING protein of claim 5, wherein the unmodified human STING protein has the sequence set forth in any of SEQ ID NOs: 305-309, or is a variant of any of SEQ ID NOs: 305-309 that has at least 95% sequence identity to any of SEQ ID NOs: 305-309 and has STING protein type I IFN signaling activity.

7. The modified STING protein of claim 5, wherein the CTT portion is from Tasmanian devil STING.

8. The modified STING protein of claim 1, wherein the modifications in the STING protein that confer constitutive activity comprise the replacement(s) N154S, or R284G, or N154S/R284G.

9. The modified STING protein of claim 7 that comprises human STING with a CTT from Tasmanian devil and comprises the sequence of amino acids set forth in SEQ ID NO:397 or a sequence having at least 95% sequence identity to the sequence set forth in SEQ ID NO:397 and having constitutive activity in inducing type I IFN, and lower NF-κB signaling activity than human STING.

10. The modified STING protein of claim 3, wherein the unmodified non-human STING protein has the sequence of amino acids set forth in any of SEQ ID NOs: 349, 356, or 359-368, or is an allelic variant of the STING protein of each species, having at least 98% sequence identity to the sequence of amino acids set forth in any of SEQ ID NOs: 349, 356, or 359-368, respectively.

11. The modified STING protein of claim 1, wherein:
the STING protein is a non-human STING protein, or is a chimera comprising human STING and a CTT from a non-human STING protein that has lower NF-κB signaling activity than the NF-κB signaling activity of human STING in place of the human STING CTT;
the unmodified STING protein or modified non-human STING protein has the sequence of amino acids set forth in any of SEQ ID NOs: 349-354 and 356-368, or a sequence having at least 98% sequence identity to the sequence of amino acids set forth in any of SEQ ID NOs: 349-354 and 356-368; and
the CTT tail in the chimera has the sequence of amino acids set forth in any of SEQ ID NOs: 371-381 or 383, or a sequence having at least 98% sequence identity to the sequence of amino acids set forth in any of SEQ ID NOs: 371-381 or 383.

12. The modified STING protein of claim 1, wherein:
the amino acid modifications that confer constitutive activity correspond to those associated with the auto-inflammatory disease STING-associated vasculopathy with onset in infancy (SAVI); and
corresponding amino acid residues are determined by alignment with human STING of any of SEQ ID NOs: 305-309.

13. The modified STING protein of claim 1, wherein:
the STING protein is a chimera comprising portions from two species;
the first species is human, and the second species is selected from among Tasmanian devil, marmoset, cattle, cat, ostrich, boar, bat, manatee, crested ibis, coelacanth, and ghost shark; and
the resulting chimera has constitutive activity for inducing type I interferon activity and lower NF-κB signaling than unmodified human STING.

14. The modified STING protein of claim 11, wherein the replacing CTT is selected from among the following species, and has a sequence:
Tasmanian devil
SEQ ID NO: 371
RQEEFAIGPKRAMTVTTSSTLSQEPQLLISGMEQPLSLRTDGF,
Marmoset
SEQ ID NO: 372
EEEEVTVGSLKTSEVPSTSTMSQEPELLISGMEKPLPLRSDLF,
Cow
SEQ ID NO: 373
EREVTMGSTETSVMPGSSVLSQEPELLISGLEKPLPLRSDVF,
Cat
SEQ ID NO: 374
EREVTVGSVGTSMVRNPSVLSQEPNLLISGMEQPLPLRTDVF,
Ostrich
SEQ ID NO: 375
RQEEYTVCDGTLCSTDLSLQISESDLPQPLRSDCL,
Boar
SEQ ID NO: 376
EREVTMGSAETSVVPTSSTLSQEPELLISGMEQPLPLRSDIF,
Bat
SEQ ID NO: 377
EKEEVTVGTVGTYEAPGSSTLHQEPELLISGMDQPLPLRTDIF,
Manatee
SEQ ID NO: 378
EREEVTVGSVGTSVVPSPSSPSTSSLSQEPKLLISGMEQPLPLRTDVF,
Crested ibis
SEQ ID NO: 379
CHEEYTVYEGNQPHNPSTTLHSTELNLQISESDLPQPLRSDCF,
Coelacanth
(variant 1)
SEQ ID NO: 380
QKEEYFMSEQTQPNSSSTSCLSTEPQLMISDTDAPHTLKRQVC,
Coelacanth
(variant 2)
SEQ ID NO: 381
QKEEYFMSEQTQPNSSSTSCLSTEPQLMISDTDAPHTLKSGF,
and
Ghost shark
SEQ ID NO: 383
LTEYPVAEPSNANETDCMSSEPHLMISDDPKPLRSYCP,
or allelic variants of each of these sequences, having at least 98% sequence identity thereto.

15. The modified STING protein of claim 1, wherein the amino acid modifications comprise two or more amino acid replacements that correspond(s) to S102P, V147L, V147M, N154S, V155M, G166E, C206Y, G207E, S102P/F279L, F279L, R281Q, R284G, R284S, R284M, R284K, R284T, R197A, D205A, R310A, R293A, T294A, E296A, R197A/D205A, S272A/Q273A, R310A/E316A, E316A, E316N, E316Q, S272A, R293A/T294A/E296A, D231A, R232A, K236A, Q273A, S358A/E360A/S366A, D231A/R232A/K236A/R238A, S358A, E360A, S366A, R238A, R375A, N154S/R284G, and S324A/S326A, with reference, for alignment, to the sequence of human STING, as set forth in any of SEQ ID NOs: 305-309.

16. The modified STING protein of claim 15, wherein the replacements comprise N154S and R284G.

17. A composition, comprising:
an immunostimulatory protein; and
the modified STING protein of claim 11 that is a chimeric protein that comprises the sequence of amino acids set forth in SEQ ID NO:397 or comprises a sequence of amino acids that has at least 95% sequence identity to SEQ ID NO:397 and that has constitutive activity in inducing type I interferon, and lower NF-κB signaling activity than the unmodified human STING protein, or is the modified STING that comprises the sequence of amino acids set forth in SEQ ID NO:398 or a sequence that has at least 95% sequence identity to SEQ ID NO:398 and that has constitutive activity in inducing type I interferon.

18. A combination, comprising the modified STING protein of claim 1, and an immunostimulatory protein that confers or contributes to an anti-tumor immune response in a tumor microenvironment.

19. A combination, comprising the modified STING protein of claim 9 and a cytokine.

20. A combination, comprising the modified STING protein of claim 9 and IL-15/IL-15R alpha chain complex.

21. The combination of claim 18, wherein the immunostimulatory protein comprises a cytokine.

22. The combination of claim 18, wherein the immunostimulatory protein is IL-15/IL-15R alpha chain complex that has the sequence of amino acids set forth in SEQ ID NO:426, or a sequence that has at least 95% sequence identity with the sequence set forth in SEQ ID NO:426.

23. The combination of claim 18, wherein the immunostimulatory protein that confers or contributes to an anti-tumor immune response in the tumor microenvironment is selected from among one or more of: IFN-α, IFN-β, GM-CSF, IL-2, IL-7, IL-12, IL-15, IL-18, IL-21, IL-23, IL-12p70 (IL-12p40+IL-12p35), IL-15/IL-15R alpha chain complex, IL-36 gamma, IL-2 that has attenuated binding to IL-2Ra, IL-2 that is modified so that it does not bind to IL-2Ra, CXCL9, CXCL10 (IP-10), CXCL11, CCL3, CCL4, CCL5, molecules involved in the potential recruitment and/or persistence of T-cells, CD40, CD40 ligand (CD40L), OX40, OX40 ligand (OX40L), 4-1BB, 4-1BB ligand (4-1BBL), 4-1BBL with a deleted cytoplasmic domain (4-1BBLΔcyt) or with a partially deleted cytoplasmic domain, whereby the cytoplasmic domain is deleted or truncated to eliminate the immunosuppressive reverse signaling, members of the B7-CD28 family, and members of the tumor necrosis factor receptor (TNFR) superfamily.

24. The combination of claim 18, wherein the combination comprises protein combinations selected from among:
the modified STING protein and one or more of IL-12, or IL-15, or IL-12p70, or IL-15/IL-15R alpha chain complex;
the modified STING protein, a cytokine, a STING pathway agonist, and either a costimulatory receptor ligand or an immune checkpoint inhibitor;
the modified STING protein, a cytokine, a STING pathway agonist, and a TGF-beta polypeptide antagonist; or
the modified STING protein, a cytokine, a STING pathway agonist, a TGF-beta polypeptide antagonist, and either a co-stimulatory receptor ligand or an immune checkpoint inhibitor,
wherein a STING pathway agonist is any product that increases type I interferon expression via activation of the STING pathway.

25. The combination of claim 18 that comprises a combination of therapeutic products selected from among the following combinations:
the modified STING protein and an anti-CTLA-4 antibody,
the modified STING protein and IL-15 or IL-15/IL-15R alpha chain complex,
the modified STING protein and 4-1BBL,
the modified STING protein and a TGF-beta receptor decoy or antagonist polypeptide,
the modified STING protein and IL-12,
the modified STING protein, an anti-CTLA-4 antibody, and IL-15 or IL-15/IL-15R alpha chain complex,
the modified STING protein, 4-1BBL, and IL-15,
the modified STING protein, a TGF-beta receptor decoy or antagonist polypeptide, and IL-15 or IL-15/IL-15R alpha chain complex,
the modified STING protein, an anti-CTLA-4 antibody, and IL-12,
the modified STING protein, 4-1BBL, and IL-12,
the modified STING protein, a TGF-beta receptor decoy or polypeptide antagonist, and IL-12,
the modified STING protein, an anti-CTLA-4 antibody, IL-15 or IL-15/IL-15R alpha chain complex, and a TGF-beta receptor decoy or polypeptide antagonist,
the modified STING protein, 4-1BBL, IL-15 or IL-15/IL-15R alpha chain complex, and a TGF-beta receptor decoy or polypeptide antagonist,
the modified STING protein, an anti-CTLA-4 antibody, IL-12, and a TGF-beta receptor decoy or polypeptide antagonist,
the modified STING protein, 4-1BBL, IL-12, and a TGF-beta receptor decoy or polypeptide antagonist,
the modified STING protein, an anti-CTLA-4 antibody, IL-12, and IL-15 or IL-15/IL-15R alpha chain complex,
the modified STING protein, 4-1BBL, IL-12, and IL-15 or IL-15/IL-15R alpha chain complex,
the modified STING protein, a TGF-beta receptor decoy or polypeptide antagonist, IL-12, and IL-15 or IL-15/IL-15R alpha chain complex,
the modified STING protein, an anti-CTLA-4 antibody, IL-12, IL-15 or IL-15/IL-15R alpha chain complex, and a TGF-beta receptor decoy or polypeptide antagonist,
the modified STING protein, 4-1BBL, IL-12, IL-21, and a TGF-beta receptor decoy or polypeptide antagonist,
the modified STING protein, IL-12, and IL-15 or IL-15/IL-15R alpha chain complex,
the modified STING protein, IL-15 or IL-15/IL-15R alpha chain complex, and IL-21,
the modified STING protein, IL-12, and IL-21,
the modified STING protein, an anti-CTLA-4 antibody, IL-15 or IL-15/IL-15R alpha chain complex, and IL-21,
the modified STING protein, an anti-CTLA-4 antibody, IL-12, and IL-21,
the modified STING protein, 4-1BBL, IL-15 or IL-15/IL-15R alpha chain complex, and IL-21,
the modified STING protein, 4-1BBL, IL-12, and IL-21,
the modified STING protein, IL-12p70, IL-21, and 4-1BBL (including 4-1BBLΔcyt),
the modified STING protein and IL-12p70,
the modified STING protein, IL-12p70, and 4-1BBL (including 4-1BBLΔcyt),
the modified STING protein, IL-12p70, and IL-18,
the modified STING protein, IL-12p70, IL-18, and 4-1BBL (including 4-1BBLΔcyt),
the modified STING protein, an anti-CTLA-4 antibody, and IL-15/IL-15Rα,
the modified STING protein, an anti-CTLA-4 antibody, IL-15/IL-15Rα, and 4-1BBL (including 4-1BBLΔcyt),
the modified STING protein, an anti-CTLA-4 antibody, IL-15/IL-15Rα, and IL-12p70,
the modified STING protein, an anti-CTLA-4 antibody, IL-15/IL-15Rα, IL-12p70, and 4-1BBL (including 4-1BBLΔcyt),
the modified STING protein, an anti-CTLA-4 antibody, IL-15/IL-15Rα, IL-21, and 4-1BBL (including 4-1BBLΔcyt),
the modified STING protein, an anti-CTLA-4 antibody, IL-12p70, and IL-21,
the modified STING protein, an anti-CTLA-4 antibody, IL-12p70, IL-21, and 4-1BBL (including 4-1BBLΔcyt),
the modified STING protein, an anti-CTLA-4 antibody, and IL-12p70,
the modified STING protein, an anti-CTLA-4 antibody, IL-12p70, and 4-1BBL (including 4-1BBLΔcyt),
the modified STING protein, an anti-CTLA-4 antibody, IL-12p70, and IL-18,
the modified STING protein, an anti-CTLA-4 antibody, IL-12p70, IL-18, and 4-1BBL (including 4-1BBLΔcyt),
the modified STING protein and an anti-CTLA-4 antibody,
the modified STING protein, a CD40 agonist, IL-15/IL-15Rα, and IL-12p70,
the modified STING protein, a CD40 agonist, IL-15/IL-15Rα, and IL-21,
the modified STING protein, a CD40 agonist, IL-15/IL-15Rα, IL-12p70, and 4-1BBL (including 4-1BBLΔcyt),
the modified STING protein, a CD40 agonist, IL-15/IL-15Rα, IL-21, and 4-1BBL (including 4-1BBLΔcyt),
the modified STING protein, a CD40 agonist, and IL-15/IL-15Rα,
the modified STING protein, a CD40 agonist, IL-15/IL-15Rα, and 4-1BBL (including 4-1BBLΔcyt),
the modified STING protein, a CD40 agonist, IL-12p70, and IL-21,
the modified STING protein, a CD40 agonist, IL-12p70, IL-21, and 4-1BBL (including 4-1BBLΔcyt),
the modified STING protein, a CD40 agonist, and IL-12p70,
the modified STING protein, a CD40 agonist, IL-12p70, and 4-1BBL (including 4-1BBLΔcyt),
the modified STING protein, a CD40 agonist, IL-12p70, and IL-18,
the modified STING protein, a CD40 agonist, IL-12p70, IL-18, and 4-1BBL (including 4-1BBLΔcyt), and
the modified STING protein and a CD40 agonist,
wherein:
4-1BBL is 4-1BBL with a deleted cytoplasmic domain (4-1BBLΔcyt), 4-1BBL with a modified cytoplasmic domain, 4-1BBL with a truncated cytoplasmic domain, or 4-1BBL with a truncated and modified cytoplasmic domain; and
an anti-CTLA-4 antibody is an scFv or an scFv-Fc.

26. The combination of claim 18 that comprises the modified STING protein and IL-2, and one or more additional products selected from among:
IL-12p70;
IL-21;
IL-12p70, and 4-1BBL (including 4-1BBLΔcyt), where Δcyt is a deleted cytoplasmic domain;
IL-21, and 4-1BBL (including 4-1BBLΔcyt);
a TGF-β decoy receptor or a TGF-β polypeptide antagonist, and IL-12p70;
a TGF-β decoy receptor or a TGF-β polypeptide antagonist, and IL-21;
a TGF-β decoy receptor or a TGF-β polypeptide antagonist, IL-12p70, and 4-1BBL (including 4-1BBLΔcyt);
a TGF-β decoy receptor or a TGF-β polypeptide antagonist, IL-21, and 4-1BBL (including 4-1BBLΔcyt);
a TGF-β decoy receptor or a TGF-β polypeptide antagonist, and IL-15/IL-15Rα;
a TGF-β decoy receptor or a TGF-β polypeptide antagonist, IL-15/IL-15Rα, and 4-1BBL (including 4-1BBLΔcyt);
a TGF-β decoy receptor or a TGF-β polypeptide antagonist, IL-15/IL-15Rα, and IL-12p70;
a TGF-β decoy receptor or a TGF-β polypeptide antagonist, IL-15/IL-15Rα, and IL-21;
a CD40 agonist, and IL-12p70;
a CD40 agonist, and IL-21;
a CD40 agonist, IL-12p70, and 4-1BBL (including 4-1BBLΔcyt); and
a CD40 agonist, IL-21, and 4-1BBL (including 4-1BBLΔcyt);
wherein:
4-1BBL is 4-1BBL with a deleted cytoplasmic domain (4-1BBLΔcyt), 4-1BBL with a modified cytoplasmic domain, 4-1BBL with a truncated cytoplasmic domain, or 4-1BBL with a truncated and modified cytoplasmic domain; and
an anti-CTLA-4 antibody is an scFv or an scFv-Fc.

27. A combination, comprising the modified STING protein of claim 1, and an immune checkpoint inhibitor antibody, or an antigen-binding portion thereof.

28. The combination of claim 18 that is a composition comprising the STING protein and immunostimulatory protein.

29. A pharmaceutical composition, comprising the combination of claim 18 in a pharmaceutically acceptable vehicle.

30. A pharmaceutical composition, comprising the modified STING protein of claim 1 in a pharmaceutically acceptable vehicle.

31. A delivery vehicle, comprising the modified STING protein of claim 1.

32. The delivery vehicle of claim 31 that is an exosome, a nanoparticle, a minicell, an isolated cell, a liposome, a lysosome, a virus, or a bacterium.

33. A method of treatment of cancer, comprising administering the modified STING protein of claim 1 to a subject who has cancer.

34. A method of treatment of cancer, comprising administering the combination of claim 18 to a subject who has cancer.

The application's sequence listing, which the Patent Office published only in electronic form, follows.

SEQUENCE LISTING (432 sequences)

SEQ ID NO: 1 - DNA, 19 bp, Homo sapiens
  Human PD-L1 shRNA target 1
gtagagtatggtagcaata

SEQ ID NO: 2 - DNA, 19 bp, Homo sapiens
  Human PD-L1 shRNA target 2
gccgactacaagcgaatta

SEQ ID NO: 3 - DNA, 19 bp, Homo sapiens
  Human PD-L1 shRNA target 3
gacaagcagtgaccatcaa

SEQ ID NO: 4 - DNA, 19 bp, Homo sapiens
  Human PD-L1 shRNA target 4
gaatcaacacaacaactaa

SEQ ID NO: 5 - DNA, 19 bp, Homo sapiens
  Human PD-L1 shRNA target 5
gcacatcctccaaatgaaa

SEQ ID NO: 6 - DNA, 19 bp, Homo sapiens
  Human PD-L1 shRNA target 6
gtagcactgacattcatct

SEQ ID NO: 7 - DNA, 19 bp, Homo sapiens
  Human CTNNB1 shRNA target 1
gacagactgccttcaaatt

SEQ ID NO: 8 - DNA, 19 bp, Homo sapiens
  Human CTNNB1 shRNA target 2
gcagctggaattctttcta

SEQ ID NO: 9 - DNA, 19 bp, Homo sapiens
  Human CTNNB1 shRNA target 3
gactaccagttgtggttaa

SEQ ID NO: 10 - DNA, 19 bp, Homo sapiens
  Human CTNNB1 shRNA target 4
ggacacagcagcaatttgt

SEQ ID NO: 11 - DNA, 19 bp, Homo sapiens
  Human CTNNB1 shRNA target 5
ggatgttcacaaccgaatt

SEQ ID NO: 12 - DNA, 19 bp, Homo sapiens
  Human CTNNB1 shRNA target 6
gccacaagattacaagaaa

SEQ ID NO: 13 - DNA, 19 bp, Homo sapiens
  Human SIRP-alpha shRNA target 1
gccaggtgaggaagttcta

SEQ ID NO: 14 - DNA, 19 bp, Homo sapiens
  Human SIRP-alpha shRNA target 2
gagctggctcctggtgaat

SEQ ID NO: 15 - DNA, 19 bp, Homo sapiens
  Human SIRP-alpha shRNA target 3
gctgagaacactggatcta

SEQ ID NO: 16 - DNA, 19 bp, Homo sapiens
  Human SIRP-alpha shRNA target 4
gaagaatgccagagaaata

SEQ ID NO: 17 - DNA, 19 bp, Homo sapiens
  Human SIRP-alpha shRNA target 5
ggacacaaatgatatcaca

SEQ ID NO: 18 - DNA, 19 bp, Homo sapiens
  Human SIRP-alpha shRNA target 6
ggagtatgccagcattcag

SEQ ID NO: 19 - DNA, 19 bp, Homo sapiens
  Human Trex1 shRNA target 1
gcagcgcatgggcgtcaat

SEQ ID NO: 20 - DNA, 19 bp, Homo sapiens
  Human Trex1 shRNA target 2
ggcccaaggaagagctata

SEQ ID NO: 21 - DNA, 19 bp, Homo sapiens
  Human Trex1 shRNA target 3
gcaccatcaggcccatgta

SEQ ID NO: 22 - DNA, 19 bp, Homo sapiens
  Human Trex1 shRNA target 4
gccacaaccaggaacacta

SEQ ID NO: 23 - DNA, 19 bp, Homo sapiens
  Human Trex1 shRNA target 5
gcaggggtaccaaggatct

SEQ ID NO: 24 - DNA, 19 bp, Homo sapiens
  Human Trex1 shRNA target 6
gccacactgtatggactat

SEQ ID NO: 25 - DNA, 19 bp, Homo sapiens
  Human VISTA shRNA target 1
gatgtgaccttctacaaga

SEQ ID NO: 26 - DNA, 19 bp, Homo sapiens
  Human VISTA shRNA target 2
gaccaccatggcaacttct

SEQ ID NO: 27 - DNA, 19 bp, Homo sapiens
  Human VISTA shRNA target 3
ggtgcagacaggcaaagat

SEQ ID NO: 28 - DNA, 19 bp, Homo sapiens
  Human VISTA shRNA target 4
gtgcctgcatcgtaggaat

SEQ ID NO: 29 - DNA, 19 bp, Homo sapiens
  Human VISTA shRNA target 5
gcaacattcaagggattga

SEQ ID NO: 30 - DNA, 19 bp, Homo sapiens
  Human VISTA shRNA target 6
gtccctgactctccaaact

SEQ ID NO: 31 - DNA, 870 bp, Homo sapiens
  programmed death-ligand 1 (PD-L1), isoform 1
atgaggatatttgctgtctttatattcatgacctactggcatttgctgaacgcatttactgtcacggttcccaaggacctatatgtggtagagtatggtagcaatatgacaattgaatgcaaattcccagtagaaaaacaattagacctggctgcactaattgtctattgggaaatggaggataagaacattattcaatttgtgcatggagaggaagacctgaaggttcagcatagtagctacagacagagggcccggctgttgaaggaccagctctccctgggaaatgctgcacttcagatcacagatgtgaaattgcaggatgcaggggtgtaccgctgcatgatcagctatggtggtgccgactacaagcgaattactgtgaaagtcaatgccccatacaacaaaatcaaccaaagaattttggttgtggatccagtcacctctgaacatgaactgacatgtcaggctgagggctaccccaaggccgaagtcatctggacaagcagtgaccatcaagtcctgagtggtaagaccaccaccaccaattccaagagagaggagaagcttttcaatgtgaccagcacactgagaatcaacacaacaactaatgagattttctactgcacttttaggagattagatcctgaggaaaaccatacagctgaattggtcatcccagaactacctctggcacatcctccaaatgaaaggactcacttggtaattctgggagccatcttattatgccttggtgtagcactgacattcatcttccgtttaagaaaagggagaatgatggatgtgaaaaaatgtggcatccaagatacaaactcaaagaagcaaagtgatacacatttggaggagacg

SEQ ID NO: 32 - DNA, 2343 bp, Homo sapiens
  CTNNB1 (Beta-catenin), isoform 1
atggctactcaagctgatttgatggagttggacatggccatggaaccagacagaaaagcggctgttagtcactggcagcaacagtcttacctggactctggaatccattctggtgccactaccacagctccttctctgagtggtaaaggcaatcctgaggaagaggatgtggatacctcccaagtcctgtatgagtgggaacagggattttctcagtccttcactcaagaacaagtagctgatattgatggacagtatgcaatgactcgagctcagagggtacgagctgctatgttccctgagacattagatgagggcatgcagatcccatctacacagtttgatgctgctcatcccactaatgtccagcgtttggctgaaccatcacagatgctgaaacatgcagttgtaaacttgattaactatcaagatgatgcagaacttgccacacgtgcaatccctgaactgacaaaactgctaaatgacgaggaccaggtggtggttaataaggctgcagttatggtccatcagctttctaaaaaggaagcttccagacacgctatcatgcgttctcctcagatggtgtctgctattgtacgtaccatgcagaatacaaatgatgtagaaacagctcgttgtaccgctgggaccttgcataacctttcccatcatcgtgagggcttactggccatctttaagtctggaggcattcctgccctggtgaaaatgcttggttcaccagtggattctgtgttgttttatgccattacaactctccacaaccttttattacatcaagaaggagctaaaatggcagtgcgtttagctggtgggctgcagaaaatggttgccttgctcaacaaaacaaatgttaaattcttggctattacgacagactgccttcaaattttagcttatggcaaccaagaaagcaagctcatcatactggctagtggtggaccccaagctttagtaaatataatgaggacctatacttacgaaaaactactgtggaccacaagcagagtgctgaaggtgctatctgtctgctctagtaataagccggctattgtagaagctggtggaatgcaagctttaggacttcacctgacagatccaagtcaacgtcttgttcagaactgtctttggactctcaggaatctttcagatgctgcaactaaacaggaagggatggaaggtctccttgggactcttgttcagcttctgggttcagatgatataaatgtggtcacctgtgcagctggaattctttctaacctcacttgcaataattataagaacaagatgatggtctgccaagtgggtggtatagaggctcttgtgcgtactgtccttcgggctggtgacagggaagacatcactgagcctgccatctgtgctcttcgtcatctgaccagccgacaccaagaagcagagatggcccagaatgcagttcgccttcactatggactaccagttgtggttaagctcttacacccaccatcccactggcctctgataaaggctactgttggattgattcgaaatcttgccctttgtcccgcaaatcatgcacctttgcgtgagcagggtgccattccacgactagttcagttgcttgttcgtgcacatcaggatacccagcgccgtacgtccatgggtgggacacagcagcaatttgtggagggggtccgcatggaagaaatagttgaaggttgtaccggagcccttcacatcctagctcgggatgttcacaaccgaattgttatcagaggactaaataccattccattgtttgtgcagctgctttattctcccattgaaaacatccaaagagtagctgcaggggtcctctgtgaacttgctcaggacaaggaagctgcagaagctattgaagctgagggagccacagctcctctgacagagttacttcactctaggaatgaaggtgtggcgacatatgcagctgctgttttgttccgaatgtctgaggacaagccacaagattacaagaaacggctttcagttgagctgaccagctctctcttcagaacagagccaatggcttggaatgagactgctgatcttggacttgatattggtgcccagggagaaccccttggatatcgccaggatgatcctagctatcgttcttttcactctggtggatatggccaggatgccttgggtatggaccccatgatggaacatgagatgggtggccaccaccctggtgctgactatccagttgatgggctgccagatctggggcatgcccaggacctcatggatgggctgcctccaggtgacagcaatcagctggcctggtttgatactgacctg

SEQ ID NO: 33 - DNA, 1512 bp, Homo sapiens
  signal regulatory protein alpha (SIRP-alpha) isoform 1
atggagcccgccggcccggcccccggccgcctcgggccgctgctctgcctgctgctcgccgcgtcctgcgcctggtcaggagtggcgggtgaggaggagctgcaggtgattcagcctgacaagtccgtgttggttgcagctggagagacagccactctgcgctgcactgcgacctctctgatccctgtggggcccatccagtggttcagaggagctggaccaggccgggaattaatctacaatcaaaaagaaggccacttcccccgggtaacaactgtttcagacctcacaaagagaaacaacatggacttttccatccgcatcggtaacatcaccccagcagatgccggcacctactactgtgtgaagttccggaaagggagccccgatgacgtggagtttaagtctggagcaggcactgagctgtctgtgcgcgccaaaccctctgcccccgtggtatcgggccctgcggcgagggccacacctcagcacacagtgagcttcacctgcgagtcccacggcttctcacccagagacatcaccctgaaatggttcaaaaatgggaatgagctctcagacttccagaccaacgtggaccccgtaggagagagcgtgtcctacagcatccacagcacagccaaggtggtgctgacccgcgaggacgttcactctcaagtcatctgcgaggtggcccacgtcaccttgcagggggaccctcttcgtgggactgccaacttgtctgagaccatccgagttccacccaccttggaggttactcaacagcccgtgagggcagagaaccaggtgaatgtcacctgccaggtgaggaagttctacccccagagactacagctgacctggttggagaatggaaacgtgtcccggacagaaacggcctcaaccgttacagagaacaaggatggtacctacaactggatgagctggctcctggtgaatgtatctgcccacagggatgatgtgaagctcacctgccaggtggagcatgacgggcagccagcggtcagcaaaagccatgacctgaaggtctcagcccacccgaaggagcagggctcaaataccgccgctgagaacactggatctaatgaacggaacatctatattgtggtgggtgtggtgtgcaccttgctggtggccctactgatggcggccctctacctcgtccgaatcagacagaagaaagcccagggctccacttcttctacaaggttgcatgagcccgagaagaatgccagagaaataacacaggacacaaatgatatcacatatgcagacctgaacctgcccaaggggaagaagcctgctccccaggctgcggagcccaacaaccacacggagtatgccagcattcagaccagcccgcagcccgcgtcggaggacaccctcacctatgctgacctggacatggtccacctcaaccggacccccaagcagccggcccccaagcctgagccgtccttctcagagtacgccagcgtccaggtcccgaggaag

SEQ ID NO: 34 - DNA, 1108 bp, Homo sapiens
  TREX1 isoform 1
aatgggccctggagctcgcagacagggcaggattgtgcagggaaggcctgagatgtgcttctgcccaccccctaccccactccctccccttcggatcttaacactgggcactcacacacccaccccatgctcctctccaggctcagcagcaggtacgtacccaaccatgggctcgcaggccctgcccccggggcccatgcagaccctcatctttttcgacatggaggccactggcttgcccttctcccagcccaaggtcacggagctgtgcctgctggctgtccacagatgtgccctggagagcccccccacctctcaggggccacctcccacagttcctccaccaccgcgtgtggtagacaagctctccctgtgtgtggctccggggaaggcctgcagccctgcagccagcgagatcacaggtctgagcacagctgtgctggcagcgcatgggcgtcaatgttttgatgacaacctggccaacctgctcctagccttcctgcggcgccagccacagccctggtgcctggtggcacacaatggtgaccgctacgacttccccctgctccaagcagagctggctatgctgggcctcaccagtgctctggatggtgccttctgtgtggatagcatcactgcgctgaaggccctggagcgagcaagcagcccctcagaacacggcccaaggaagagctatagcctaggcagcatctacactcgcctgtatgggcagtcccctccagactcgcacacggctgagggtgatgtcctggccctgctcagcatctgtcagtggagaccacaggccctgctgcggtgggtggatgctcacgccaggcctttcggcaccatcaggcccatgtatggggtcacagcctctgctaggaccaagccaagaccatctgctgtcacaaccactgcacacctggccacaaccaggaacactagtcccagccttggagagagcaggggtaccaaggatcttcctccagtgaaggaccctggagccctatccagggaggggctgctggccccactgggtctgctggccatcctgaccttggcagtagccacactgtatggactatccctggccacacctggggag

SEQ ID NO: 35 - DNA, 933 bp, Homo sapiens
  V-domain Ig suppressor of T cell activation (VISTA)
atgggcgtccccacggccctggaggccggcagctggcgctggggatccctgctcttcgctctcttcctggctgcgtccctaggtccggtggcagccttcaaggtcgccacgccgtattccctgtatgtctgtcccgaggggcagaacgtcaccctcacctgcaggctcttgggccctgtggacaaagggcacgatgtgaccttctacaagacgtggtaccgcagctcgaggggcgaggtgcagacctgctcagagcgccggcccatccgcaacctcacgttccaggaccttcacctgcaccatggaggccaccaggctgccaacaccagccacgacctggctcagcgccacgggctggagtcggcctccgaccaccatggcaacttctccatcaccatgcgcaacctgaccctgctggatagcggcctctactgctgcctggtggtggagatcaggcaccaccactcggagcacagggtccatggtgccatggagctgcaggtgcagacaggcaaagatgcaccatccaactgtgtggtgtacccatcctcctcccaggatagtgaaaacatcacggctgcagccctggctacgggtgcctgcatcgtaggaatcctctgcctccccctcatcctgctcctggtctacaagcaaaggcaggcagcctccaaccgccgtgcccaggagctggtgcggatggacagcaacattcaagggattgaaaaccccggctttgaagcctcaccacctgcccaggggatacccgaggccaaagtcaggcaccccctgtcctatgtggcccagcggcagccttctgagtctgggcggcatctgctttcggagcccagcacccccctgtctcctccaggccccggagacgtcttcttcccatccctggaccctgtccctgactctccaaactttgaggtcatc

SEQ ID NO: 36 - DNA, 45 bp, Artificial Sequence
  shRNA-encoding sequence for huPD-L1
gtagagtatggtagcaatatctagagtattgctaccatactctac

SEQ ID NO: 37 - DNA, 45 bp, Artificial Sequence
  shRNA-encoding sequence for huCTNNB1
gacagactgccttcaaatttctagagaatttgaaggcagtctgtc

SEQ ID NO: 38 - DNA, 45 bp, Artificial Sequence
  shRNA-encoding sequence for huSIRPalpha
gccaggtgaggaagttctatctagagtagaacttcctcacctggc

SEQ ID NO: 39 - DNA, 45 bp, Artificial Sequence
  shRNA-encoding sequence for huTREX1
gcagcgcatgggcgtcaattctagagattgacgcccatgcgctgc

SEQ ID NO: 40 - DNA, 45 bp, Artificial Sequence
  shRNA-encoding sequence for huVISTA
gaccaccatggcaacttcttctagagagaagttgccatggtggtc

SEQ ID NO: 41 - DNA, 3220 bp, Artificial Sequence
  pEQU6 vector
ctttcctgcgttatcccctgattctgtggataaccgtattaccgcctttgagtgagctgataccgctcgccgcagccgaacgaccgagcgcagcgagtcagtgagcgaggaagcggaagagcgcccaatacgcaaaccgcctctccccgcgcgttggccgattcattaatgcagctggcacgacaggtttcccgactggaaagcgggcagtgagcgcaacgcaattaatacgcgtaccgctagccaggaagagtttgtagaaacgcaaaaaggccatccgtcaggatggccttctgcttagtttgatgcctggcagtttatggcgggcgtcctgcccgccaccctccgggccgttgcttcacaacgttcaaatccgctcccggcggatttgtcctactcaggagagcgttcaccgacaaacaacagataaaacgaaaggcccagtcttccgactgagcctttcgttttatttgatgcctggcagttccctactctcgcgttaacgctagcatggatgttttcccagtcacgacgttgtaaaacgacggccagtcttaagctcgggccccaaataatgattttattttgactgatagtgacctgttcgttgcaacaaattgatgagcaatgcttttttataatgccaactttgtacaaaaaagcaggctttaaaggaaccaattcagtcgactggatccaaggtcgggcaggaagagggcctatttcccatgattccttcatatttgcatatacgatacaaggctgttagagagataattagaattaatttgactgtaaacacaaagatattagtacaaaatacgtgacgtagaaagtaataatttcttgggtagtttgcagttttaaaattatgttttaaaatggactatcatatgcttaccgtaacttgaaagtatttcgatttcttggctttatatatcttgtggaaaggacgaaactagttttttctcgagtagctagagaattcatggtaatagcgatgactaatacgtagatgtactgccaagtaggaaagtcccataaggtcatgtactgggcataatgccaggcgggccatttaccgtcattgacgtcaatagggggcgtacttggcatatgatacacttgatgtactgccaagtgggcagtttaccgtaaatagtccacccattgacgtcaatggaaagtccctattggcgttactatgggaacatacgtcattattgacgtcaatgggcgggggtcgttgggcggtcagccaggcgggccatttaccgtaagttatgtaacgcggaactccatatatgggctatgaactaatgaccccgtaattgattactattaataactagacccagctttcttgtacaaagttggcattataagaaagcattgcttatcaatttgttgcaacgaacaggtcactatcagtcaaaataaaatcattatttgccatccagctgatatcccctatagtgagtcgtattacatggtcatagctgtttcctggcagctctggcccgtgtctcaaaatctctgatgttacattgcacaagataaaaatatatcatcatgaacaataaaactgtctgcttacataaacagtaatacaaggggtgttatgagccatattcaacgggaaacgtcgaggccgcgattaaattccaacatggatgctgatttatatgggtataaatgggctcgcgataatgtcgggcaatcaggtgcgacaatctatcgcttgtatgggaagcccgatgcgccagagttgtttctgaaacatggcaaaggtagcgttgccaatgatgttacagatgagatggtcagactaaactggctgacggaatttatgcctcttccgaccatcaagcattttatccgtactcctgatgatgcatggttactcaccactgcgatccccggaaaaacagcattccaggtattagaagaatatcctgattcaggtgaaaatattgttgatgcgctggcagtgttcctgcgccggttgcattcgattcctgtttgtaattgtccttttaacagcgatcgcgtatttcgtctcgctcaggcgcaatcacgaatgaataacggtttggttgatgcgagtgattttgatgacgagcgtaatggctggcctgttgaacaagtctggaaagaaatgcataaacttttgccattctcaccggattcagtcgtcactcatggtgatttctcacttgataaccttatttttgacgaggggaaattaataggttgtattgatgttggacgagtcggaatcgcagaccgataccaggatcttgccatcctatggaactgcctcggtgagttttctccttcattacagaaacggctttttcaaaaatatggtattgataatcctgatatgaataaattgcagtttcatttgatgctcgatgagtttttctaatcagaattggttaattggttgtaacactggcagagcattacgctgacttgacgggacggcgcaagctcatgaccaaaatcccttaacgtgagttacgcgtcgttccactgagcgtcagaccccgtagaaaagatcaaaggatcttcttgagatcctttttttctgcgcgtaatctgctgcttgcaaacaaaaaaaccaccgctaccagcggtggtttgtttgccggatcaagagctaccaactctttttccgaaggtaactggcttcagcagagcgcagataccaaatactgtccttctagtgtagccgtagttaggccaccacttcaagaactctgtagcaccgcctacatacctcgctctgctaatcctgttaccagtggctgctgccagtggcgataagtcgtgtcttaccgggttggactcaagacgatagttaccggataaggcgcagcggtcgggctgaacggggggttcgtgcacacagcccagcttggagcgaacgacctacaccgaactgagatacctacagcgtgagcattgagaaagcgccacgcttcccgaagggagaaaggcggacaggtatccggtaagcggcagggtcggaacaggagagcgcacgagggagcttccagggggaaacgcctggtatctttatagtcctgtcgggtttcgccacctctgacttgagcgtcgatttttgtgatgctcgtcaggggggcggagcctatggaaaaacgccagcaacgcggcctttttacggttcctggccttttgctggccttttgct

SEQ ID NO: 42 - DNA, 3802 bp, Artificial Sequence
  pEQU6-H1 Vector
ctttcctgcgttatcccctgattctgtggataaccgtattaccgcctttgagtgagctgataccgctcgccgcagccgaacgaccgagcgcagcgagtcagtgagcgaggaagcggaagagcgcccaatacgcaaaccgcctctccccgcgcgttggccgattcattaatgcagctggcacgacaggtttcccgactggaaagcgggcagtgagcgcaacgcaattaatacgcgtaccgctagccaggaagagtttgtagaaacgcaaaaaggccatccgtcaggatggccttctgcttagtttgatgcctggcagtttatggcgggcgtcctgcccgccaccctccgggccgttgcttcacaacgttcaaatccgctcccggcggatttgtcctactcaggagagcgttcaccgacaaacaacagataaaacgaaaggcccagtcttccgactgagcctttcgttttatttgatgcctggcagttccctactctcgcgttaacgctagcatggatgttttcccagtcacgacgttgtaaaacgacggccagtcttaagctcgggccccaaataatgattttattttgactgatagtgacctgttcgttgcaacaaattgatgagcaatgcttttttataatgccaactttgtacaaaaaagcaggctttaaaggaaccaattcagtcgagaattggtaccatatttgcatgtcgctatgtgttctgggaaatcaccataaacgtgaaatgtctttggatttgggaatcttataagttctgtatgagaccactccctaggtttttgtcgacagatctggcgcgccatagtggccagcggccgcaggtaagccagcccaggcctcgccctccagctcaaggcgggacaggtgccctagagtagcctgcatccagggacaggccccagccgggtgctgacacgtccacctccatctcttcctcaggtctgcccgggtggcatccctgtgacccctccccagtgcctctcctggccctggaagttgccactccagtgcccaccagccttgtcctaataaaattaagttgcatcattttgtctgactaggtgtccttctataatattatggggtggaggggggtggtatggagcaaggggcccaagttaacttgtttattgcagcttataatggttacaaataaagcaatagcatcacaaatttcacaaataaagcatttttttcactgcattctagttgtggtttgtccaaactcatcaatgtatcttatcatgtctggatccaaggtcgggcaggaagagggcctatttcccatgattccttcatatttgcatatacgatacaaggctgttagagagataattagaattaatttgactgtaaacacaaagatattagtacaaaatacgtgacgtagaaagtaataatttcttgggtagtttgcagttttaaaattatgttttaaaatggactatcatatgcttaccgtaacttgaaagtatttcgatttcttggctttatatatcttgtggaaaggacgaaactagttttttctcgagtagctagagaattcatggtaatagcgatgactaatacgtagatgtactgccaagtaggaaagtcccataaggtcatgtactgggcataatgccaggcgggccatttaccgtcattgacgtcaatagggggcgtacttggcatatgatacacttgatgtactgccaagtgggcagtttaccgtaaatagtccacccattgacgtcaatggaaagtccctattggcgttactatgggaacatacgtcattattgacgtcaatgggcgggggtcgttgggcggtcagccaggcgggccatttaccgtaagttatgtaacgcggaactccatatatgggctatgaactaatgaccccgtaattgattactattaataactagacccagctttcttgtacaaagttggcattataagaaagcattgcttatcaatttgttgcaacgaacaggtcactatcagtcaaaataaaatcattatttgccatccagctgatatcccctatagtgagtcgtattacatggtcatagctgtttcctggcagctctggcccgtgtctcaaaatctctgatgttacattgcacaagataaaaatatatcatcatgaacaataaaactgtctgcttacataaacagtaatacaaggggtgttatgagccatattcaacgggaaacgtcgaggccgcgattaaattccaacatggatgctgatttatatgggtataaatgggctcgcgataatgtcgggcaatcaggtgcgacaatctatcgcttgtatgggaagcccgatgcgccagagttgtttctgaaacatggcaaaggtagcgttgccaatgatgttacagatgagatggtcagactaaactggctgacggaatttatgcctcttccgaccatcaagcattttatccgtactcctgatgatgcatggttactcaccactgcgatccccggaaaaacagcattccaggtattagaagaatatcctgattcaggtgaaaatattgttgatgcgctggcagtgttcctgcgccggttgcattcgattcctgtttgtaattgtccttttaacagcgatcgcgtatttcgtctcgctcaggcgcaatcacgaatgaataacggtttggttgatgcgagtgattttgatgacgagcgtaatggctggcctgttgaacaagtctggaaagaaatgcataaacttttgccattctcaccggattcagtcgtcactcatggtgatttctcacttgataaccttatttttgacgaggggaaattaataggttgtattgatgttggacgagtcggaatcgcagaccgataccaggatcttgccatcctatggaactgcctcggtgagttttctccttcattacagaaacggctttttcaaaaatatggtattgataatcctgatatgaataaattgcagtttcatttgatgctcgatgagtttttctaatcagaattggttaattggttgtaacactggcagagcattacgctgacttgacgggacggcgcaagctcatgaccaaaatcccttaacgtgagttacgcgtcgttccactgagcgtcagaccccgtagaaaagatcaaaggatcttcttgagatcctttttttctgcgcgtaatctgctgcttgcaaacaaaaaaaccaccgctaccagcggtggtttgtttgccggatcaagagctaccaactctttttccgaaggtaactggcttcagcagagcgcagataccaaatactgtccttctagtgtagccgtagttaggccaccacttcaagaactctgtagcaccgcctacatacctcgctctgctaatcctgttaccagtggctgctgccagtggcgataagtcgtgtcttaccgggttggactcaagacgatagttaccggataaggcgcagcggtcgggctgaacggggggttcgtgcacacagcccagcttggagcgaacgacctacaccgaactgagatacctacagcgtgagcattgagaaagcgccacgcttcccgaagggagaaaggcggacaggtatccggtaagcggcagggtcggaacaggagagcgcacgagggagcttccagggggaaacgcctggtatctttatagtcctgtcgggtttcgccacctctgacttgagcgtcgatttttgtgatgctcgtcaggggggcggagcctatggaaaaacgccagcaacgcggcctttttacggttcctggccttttgctggccttttgct

SEQ ID NO: 43 - DNA, 3263 bp, Artificial Sequence
  pEQU6-shPDL1-shRNA Vector
ctttcctgcgttatcccctgattctgtggataaccgtattaccgcctttgagtgagctgataccgctcgccgcagccgaacgaccgagcgcagcgagtcagtgagcgaggaagcggaagagcgcccaatacgcaaaccgcctctccccgcgcgttggccgattcattaatgcagctggcacgacaggtttcccgactggaaagcgggcagtgagcgcaacgcaattaatacgcgtaccgctagccaggaagagtttgtagaaacgcaaaaaggccatccgtcaggatggccttctgcttagtttgatgcctggcagtttatggcgggcgtcctgcccgccaccctccgggccgttgcttcacaacgttcaaatccgctcccggcggatttgtcctactcaggagagcgttcaccgacaaacaacagataaaacgaaaggcccagtcttccgactgagcctttcgttttatttgatgcctggcagttccctactctcgcgttaacgctagcatggatgttttcccagtcacgacgttgtaaaacgacggccagtcttaagctcgggccccaaataatgattttattttgactgatagtgacctgttcgttgcaacaaattgatgagcaatgcttttttataatgccaactttgtacaaaaaagcaggctttaaaggaaccaattcagtcgactggatccaaggtcgggcaggaagagggcctatttcccatgattccttcatatttgcatatacgatacaaggctgttagagagataattagaattaatttgactgtaaacacaaagatattagtacaaaatacgtgacgtagaaagtaataatttcttgggtagtttgcagttttaaaattatgttttaaaatggactatcatatgcttaccgtaacttgaaagtatttcgatttcttggctttatatatcttgtggaaaggacgaaactaggtagagtatggtagcaatatctagagtattgctaccatactctacttttttcgagtagctagagaattcatggtaatagcgatgactaatacgtagatgtactgccaagtaggaaagtcccataaggtcatgtactgggcataatgccaggcgggccatttaccgtcattgacgtcaatagggggcgtacttggcatatgatacacttgatgtactgccaagtgggcagtttaccgtaaatagtccacccattgacgtcaatggaaagtccctattggcgttactatgggaacatacgtcattattgacgtcaatgggcgggggtcgttgggcggtcagccaggcgggccatttaccgtaagttatgtaacgcggaactccatatatgggctatgaactaatgaccccgtaattgattactattaataactagacccagctttcttgtacaaagttggcattataagaaagcattgcttatcaatttgttgcaacgaacaggtcactatcagtcaaaataaaatcattatttgccatccagctgatatcccctatagtgagtcgtattacatggtcatagctgtttcctggcagctctggcccgtgtctcaaaatctctgatgttacattgcacaagataaaaatatatcatcatgaacaataaaactgtctgcttacataaacagtaatacaaggggtgttatgagccatattcaacgggaaacgtcgaggccgcgattaaattccaacatggatgctgatttatatgggtataaatgggctcgcgataatgtcgggcaatcaggtgcgacaatctatcgcttgtatgggaagcccgatgcgccagagttgtttctgaaacatggcaaaggtagcgttgccaatgatgttacagatgagatggtcagactaaactggctgacggaatttatgcctcttccgaccatcaagcattttatccgtactcctgatgatgcatggttactcaccactgcgatccccggaaaaacagcattccaggtattagaagaatatcctgattcaggtgaaaatattgttgatgcgctggcagtgttcctgcgccggttgcattcgattcctgtttgtaattgtccttttaacagcgatcgcgtatttcgtctcgctcaggcgcaatcacgaatgaataacggtttggttgatgcgagtgattttgatgacgagcgtaatggctggcctgttgaacaagtctggaaagaaatgcataaacttttgccattctcaccggattcagtcgtcactcatggtgatttctcacttgataaccttatttttgacgaggggaaattaataggttgtattgatgttggacgagtcggaatcgcagaccgataccaggatcttgccatcctatggaactgcctcggtgagttttctccttcattacagaaacggctttttcaaaaatatggtattgataatcctgatatgaataaattgcagtttcatttgatgctcgatgagtttttctaatcagaattggttaattggttgtaacactggcagagcattacgctgacttgacgggacggcgcaagctcatgaccaaaatcccttaacgtgagttacgcgtcgttccactgagcgtcagaccccgtagaaaagatcaaaggatcttcttgagatcctttttttctgcgcgtaatctgctgcttgcaaacaaaaaaaccaccgctaccagcggtggtttgtttgccggatcaagagctaccaactctttttccgaaggtaactggcttcagcagagcgcagataccaaatactgtccttctagtgtagccgtagttaggccaccacttcaagaactctgtagcaccgcctacatacctcgctctgctaatcctgttaccagtggctgctgccagtggcgataagtcgtgtcttaccgggttggactcaagacgatagttaccggataaggcgcagcggtcgggctgaacggggggttcgtgcacacagcccagcttggagcgaacgacctacaccgaactgagatacctacagcgtgagcattgagaaagcgccacgcttcccgaagggagaaaggcggacaggtatccggtaagcggcagggtcggaacaggagagcgcacgagggagcttccagggggaaacgcctggtatctttatagtcctgtcgggtttcgccacctctgacttgagcgtcgatttttgtgatgctcgtcaggggggcggagcctatggaaaaacgccagcaacgcggcctttttacggttcctggccttttgctggccttttgct

SEQ ID NO: 44 - DNA, 3888 bp, Artificial Sequence
  pEQU6-shPDL1-H1-shCTNNB1 Vector
ctttcctgcgttatcccctgattctgtggataaccgtattaccgcctttgagtgagctgataccgctcgccgcagccgaacgaccgagcgcagcgagtcagtgagcgaggaagcggaagagcgcccaatacgcaaaccgcctctccccgcgcgttggccgattcattaatgcagctggcacgacaggtttcccgactggaaagcgggcagtgagcgcaacgcaattaatacgcgtaccgctagccaggaagagtttgtagaaacgcaaaaaggccatccgtcaggatggccttctgcttagtttgatgcctggcagtttatggcgggcgtcctgcccgccaccctccgggccgttgcttcacaacgttcaaatccgctcccggcggatttgtcctactcaggagagcgttcaccgacaaacaacagataaaacgaaaggcccagtcttccgactgagcctttcgttttatttgatgcctggcagttccctactctcgcgttaacgctagcatggatgttttcccagtcacgacgttgtaaaacgacggccagtcttaagctcgggccccaaataatgattttattttgactgatagtgacctgttcgttgcaacaaattgatgagcaatgcttttttataatgccaactttgtacaaaaaagcaggctttaaaggaaccaattcagtcgagaattggtaccatatttgcatgtcgctatgtgttctgggaaatcaccataaacgtgaaatgtctttggatttgggaatcttataagttctgtatgagaccactccctaggacagactgccttcaaatttctagagaatttgaaggcagtctgtcttttttcgacagatctggcgcgccatagtggccagcggccgcaggtaagccagcccaggcctcgccctccagctcaaggcgggacaggtgccctagagtagcctgcatccagggacaggccccagccgggtgctgacacgtccacctccatctcttcctcaggtctgcccgggtggcatccctgtgacccctccccagtgcctctcctggccctggaagttgccactccagtgcccaccagccttgtcctaataaaattaagttgcatcattttgtctgactaggtgtccttctataatattatggggtggaggggggtggtatggagcaaggggcccaagttaacttgtttattgcagcttataatggttacaaataaagcaatagcatcacaaatttcacaaataaagcatttttttcactgcattctagttgtggtttgtccaaactcatcaatgtatcttatcatgtctggatccaaggtcgggcaggaagagggcctatttcccatgattccttcatatttgcatatacgatacaaggctgttagagagataattagaattaatttgactgtaaacacaaagatattagtacaaaatacgtgacgtagaaagtaataatttcttgggtagtttgcagttttaaaattatgttttaaaatggactatcatatgcttaccgtaacttgaaagtatttcgatttcttggctttatatatcttgtggaaaggacgaaactaggtagagtatggtagcaatatctagagtattgctaccatactctacttttttcgagtagctagagaattcatggtaatagcgatgactaatacgtagatgtactgccaagtaggaaagtcccataaggtcatgtactgggcataatgccaggcgggccatttaccgtcattgacgtcaatagggggcgtacttggcatatgatacacttgatgtactgccaagtgggcagtttaccgtaaatagtccacccattgacgtcaatggaaagtccctattggcgttactatgggaacatacgtcattattgacgtcaatgggcgggggtcgttgggcggtcagccaggcgggccatttaccgtaagttatgtaacgcggaactccatatatgggctatgaactaatgaccccgtaattgattactattaataactagacccagctttcttgtacaaagttggcattataagaaagcattgcttatcaatttgttgcaacgaacaggtcactatcagtcaaaataaaatcattatttgccatccagctgatatcccctatagtgagtcgtattacatggtcatagctgtttcctggcagctctggcccgtgtctcaaaatctctgatgttacattgcacaagataaaaatatatcatcatgaacaataaaactgtctgcttacataaacagtaatacaaggggtgttatgagccatattcaacgggaaacgtcgaggccgcgattaaattccaacatggatgctgatttatatgggtataaatgggctcgcgataatgtcgggcaatcaggtgcgacaatctatcgcttgtatgggaagcccgatgcgccagagttgtttctgaaacatggcaaaggtagcgttgccaatgatgttacagatgagatggtcagactaaactggctgacggaatttatgcctcttccgaccatcaagcattttatccgtactcctgatgatgcatggttactcaccactgcgatccccggaaaaacagcattccaggtattagaagaatatcctgattcaggtgaaaatattgttgatgcgctggcagtgttcctgcgccggttgcattcgattcctgtttgtaattgtccttttaacagcgatcgcgtatttcgtctcgctcaggcgcaatcacgaatgaataacggtttggttgatgcgagtgattttgatgacgagcgtaatggctggcctgttgaacaagtctggaaagaaatgcataaacttttgccattctcaccggattcagtcgtcactcatggtgatttctcacttgataaccttatttttgacgaggggaaattaataggttgtattgatgttggacgagtcggaatcgcagaccgataccaggatcttgccatcctatggaactgcctcggtgagttttctccttcattacagaaacggctttttcaaaaatatggtattgataatcctgatatgaataaattgcagtttcatttgatgctcgatgagtttttctaatcagaattggttaattggttgtaacactggcagagcattacgctgacttgacgggacggcgcaagctcatgaccaaaatcccttaacgtgagttacgcgtcgttccactgagcgtcagaccccgtagaaaagatcaaaggatcttcttgagatcctttttttctgcgcgtaatctgctgcttgcaaacaaaaaaaccaccgctaccagcggtggtttgtttgccggatcaagagctaccaactctttttccgaaggtaactggcttcagcagagcgcagataccaaatactgtccttctagtgtagccgtagttaggccaccacttcaagaactctgtagcaccgcctacatacctcgctctgctaatcctgttaccagtggctgctgccagtggcgataagtcgtgtcttaccgggttggactcaagacgatagttaccggataaggcgcagcggtcgggctgaacggggggttcgtgcacacagcccagcttggagcgaacgacctacaccgaactgagatacctacagcgtgagcattgagaaagcgccacgcttcccgaagggagaaaggcggacaggtatccggtaagcggcagggtcggaacaggagagcgcacgagggagcttccagggggaaacgcctggtatctttatagtcctgtcgggtttcgccacctctgacttgagcgtcgatttttgtgatgctcgtcaggggggcggagcctatggaaaaacgccagcaacgcggcctttttacggttcctggccttttgctggccttttgct

SEQ ID NO: 45 - DNA, 3888 bp, Artificial Sequence
  pEQU6-shPDL1-H1-shSIRPalpha Vector
ctttcctgcgttatcccctgattctgtggataaccgtattaccgcctttgagtgagctgataccgctcgccgcagccgaacgaccgagcgcagcgagtcagtgagcgaggaagcggaagagcgcccaatacgcaaaccgcctctccccgcgcgttggccgattcattaatgcagctggcacgacaggtttcccgactggaaagcgggcagtgagcgcaacgcaattaatacgcgtaccgctagccaggaagagtttgtagaaacgcaaaaaggccatccgtcaggatggccttctgcttagtttgatgcctggcagtttatggcgggcgtcctgcccgccaccctccgggccgttgcttcacaacgttcaaatccgctcccggcggatttgtcctactcaggagagcgttcaccgacaaacaacagataaaacgaaaggcccagtcttccgactgagcctttcgttttatttgatgcctggcagttccctactctcgcgttaacgctagcatggatgttttcccagtcacgacgttgtaaaacgacggccagtcttaagctcgggccccaaataatgattttattttgactgatagtgacctgttcgttgcaacaaattgatgagcaatgcttttttataatgccaactttgtacaaaaaagcaggctttaaaggaaccaattcagtcgagaattggtaccatatttgcatgtcgctatgtgttctgggaaatcaccataaacgtgaaatgtctttggatttgggaatcttataagttctgtatgagaccactccctaggccaggtgaggaagttctatctagagtagaacttcctcacctggcttttttcgacagatctggcgcgccatagtggccagcggccgcaggtaagccagcccaggcctcgccctccagctcaaggcgggacaggtgccctagagtagcctgcatccagggacaggccccagccgggtgctgacacgtccacctccatctcttcctcaggtctgcccgggtggcatccctgtgacccctccccagtgcctctcctggccctggaagttgccactccagtgcccaccagccttgtcctaataaaattaagttgcatcattttgtctgactaggtgtccttctataatattatggggtggaggggggtggtatggagcaaggggcccaagttaacttgtttattgcagcttataatggttacaaataaagcaatagcatcacaaatttcacaaataaagcatttttttcactgcattctagttgtggtttgtccaaactcatcaatgtatcttatcatgtctggatccaaggtcgggcaggaagagggcctatttcccatgattccttcatatttgcatatacgatacaaggctgttagagagataattagaattaatttgactgtaaacacaaagatattagtacaaaatacgtgacgtagaaagtaataatttcttgggtagtttgcagttttaaaattatgttttaaaatggactatcatatgcttaccgtaacttgaaagtatttcgatttcttggctttatatatcttgtggaaaggacgaaactaggtagagtatggtagcaatatctagagtattgctaccatactctacttttttcgagtagctagagaattcatggtaatagcgatgactaatacgtagatgtactgccaagtaggaaagtcccataaggtcatgtactgggcataatgccaggcgggccatttaccgtcattgacgtcaatagggggcgtacttggcatatgatacacttgatgtactgccaagtgggcagtttaccgtaaatagtccacccattgacgtcaatggaaagtccctattggcgttactatgggaacatacgtcattattgacgtcaatgggcgggggtcgttgggcggtcagccaggcgggccatttaccgtaagttatgtaacgcggaactccatatatgggctatgaactaatgaccccgtaattgattactattaataactagacccagctttcttgtacaaagttggcattataagaaagcattgcttatcaatttgttgcaacgaacaggtcactatcagtcaaaataaaatcattatttgccatccagctgatatcccctatagtgagtcgtattacatggtcatagctgtttcctggcagctctggcccgtgtctcaaaatctctgatgttacattgcacaagataaaaatatatcatcatgaacaataaaactgtctgcttacataaacagtaatacaaggggtgttatgagccatattcaacgggaaacgtcgaggccgcgattaaattccaacatggatgctgatttatatgggtataaatgggctcgcgataatgtcgggcaatcaggtgcgacaatctatcgcttgtatgggaagcccgatgcgccagagttgtttctgaaacatggcaaaggtagcgttgccaatgatgttacagatgagatggtcagactaaactggctgacggaatttatgcctcttccgaccatcaagcattttatccgtactcctgatgatgcatggttactcaccactgcgatccccggaaaaacagcattccaggtattagaagaatatcctgattcaggtgaaaatattgttgatgcgctggcagtgttcctgcgccggttgcattcgattcctgtttgtaattgtccttttaacagcgatcgcgtatttcgtctcgctcaggcgcaatcacgaatgaataacggtttggttgatgcgagtgattttgatgacgagcgtaatggctggcctgttgaacaagtctggaaagaaatgcataaacttttgccattctcaccggattcagtcgtcactcatggtgatttctcacttgataaccttatttttgacgaggggaaattaataggttgtattgatgttggacgagtcggaatcgcagaccgataccaggatcttgccatcctatggaactgcctcggtgagttttctccttcattacagaaacggctttttcaaaaatatggtattgataatcctgatatgaataaattgcagtttcatttgatgctcgatgagtttttctaatcagaattggttaattggttgtaacactggcagagcattacgctgacttgacgggacggcgcaagctcatgaccaaaatcccttaacgtgagttacgcgtcgttccactgagcgtcagaccccgtagaaaagatcaaaggatcttcttgagatcctttttttctgcgcgtaatctgctgcttgcaaacaaaaaaaccaccgctaccagcggtggtttgtttgccggatcaagagctaccaactctttttccgaaggtaactggcttcagcagagcgcagataccaaatactgtccttctagtgtagccgtagttaggccaccacttcaagaactctgtagcaccgcctacatacctcgctctgctaatcctgttaccagtggctgctgccagtggcgataagtcgtgtcttaccgggttggactcaagacgatagttaccggataaggcgcagcggtcgggctgaacggggggttcgtgcacacagcccagcttggagcgaacgacctacaccgaactgagatacctacagcgtgagcattgagaaagcgccacgcttcccgaagggagaaaggcggacaggtatccggtaagcggcagggtcggaacaggagagcgcacgagggagcttccagggggaaacgcctggtatctttatagtcctgtcgggtttcgccacctctgacttgagcgtcgatttttgtgatgctcgtcaggggggcggagcctatggaaaaacgccagcaacgcggcctttttacggttcctggccttttgctggccttttgct

SEQ ID NO: 46 - DNA, 3888 bp, Artificial Sequence
  pEQU6-shPDL1-H1-shTREX1
ctttcctgcgttatcccctgattctgtggataaccgtattaccgcctttgagtgagctgataccgctcgccgcagccgaacgaccgagcgcagcgagtcagtgagcgaggaagcggaagagcgcccaatacgcaaaccgcctctccccgcgcgttggccgattcattaatgcagctggcacgacaggtttcccgactggaaagcgggcagtgagcgcaacgcaattaatacgcgtaccgctagccaggaagagtttgtagaaacgcaaaaaggccatccgtcaggatggccttctgcttagtttgatgcctggcagtttatggcgggcgtcctgcccgccaccctccgggccgttgcttcacaacgttcaaatccgctcccggcggatttgtcctactcaggagagcgttcaccgacaaacaacagataaaacgaaaggcccagtcttccgactgagcctttcgttttatttgatgcctggcagttccctactctcgcgttaacgctagcatggatgttttcccagtcacgacgttgtaaaacgacggccagtcttaagctcgggccccaaataatgattttattttgactgatagtgacctgttcgttgcaacaaattgatgagcaatgcttttttataatgccaactttgtacaaaaaagcaggctttaaaggaaccaattcagtcgagaattggtaccatatttgcatgtcgctatgtgttctgggaaatcaccataaacgtgaaatgtctttggatttgggaatcttataagttctgtatgagaccactccctaggcagcgcatgggcgtcaattctagagattgacgcccatgcgctgcttttttcgacagatctggcgcgccatagtggccagcggccgcaggtaagccagcccaggcctcgccctccagctcaaggcgggacaggtgccctagagtagcctgcatccagggacaggccccagccgggtgctgacacgtccacctccatctcttcctcaggtctgcccgggtggcatccctgtgacccctccccagtgcctctcctggccctggaagttgccactccagtgcccaccagccttgtcctaataaaattaagttgcatcattttgtctgactaggtgtccttctataatattatggggtggaggggggtggtatggagcaaggggcccaagttaacttgtttattgcagcttataatggttacaaataaagcaatagcatcacaaatttcacaaataaagcatttttttcactgcattctagttgtggtttgtccaaactcatcaatgtatcttatcatgtctggatccaaggtcgggcaggaagagggcctatttcccatgattccttcatatttgcatatacgatacaaggctgttagagagataattagaattaatttgactgtaaacacaaagatattagtacaaaatacgtgacgtagaaagtaataatttcttgggtagtttgcagttttaaaattatgttttaaaatggactatcatatgcttaccgtaacttgaaagtatttcgatttcttggctttatatatcttgtggaaaggacgaaactaggtagagtatggtagcaatatctagagtattgctaccatactctacttttttcgagtagctagagaattcatggtaatagcgatgactaatacgtagatgtactgccaagtaggaaagtcccataaggtcatgtactgggcataatgccaggcgggccatttaccgtcattgacgtcaatagggggcgtacttggcatatgatacacttgatgtactgccaagtgggcagtttaccgtaaatagtccacccattgacgtcaatggaaagtccctattggcgttactatgggaacatacgtcattattgacgtcaatgggcgggggtcgttgggcggtcagccaggcgggccatttaccgtaagttatgtaacgcggaactccatatatgggctatgaactaatgaccccgtaattgattactattaataactagacccagctttcttgtacaaagttggcattataagaaagcattgcttatcaatttgttgcaacgaacaggtcactatcagtcaaaataaaatcattatttgccatccagctgatatcccctatagtgagtcgtattacatggtcatagctgtttcctggcagctctggcccgtgtctcaaaatctctgatgttacattgcacaagataaaaatatatcatcatgaacaataaaactgtctgcttacataaacagtaatacaaggggtgttatgagccatattcaacgggaaacgtcgaggccgcgattaaattccaacatggatgctgatttatatgggtataaatgggctcgcgataatgtcgggcaatcaggtgcgacaatctatcgcttgtatgggaagcccgatgcgccagagttgtttctgaaacatggcaaaggtagcgttgccaatgatgttacagatgagatggtcagactaaactggctgacggaatttatgcctcttccgaccatcaagcattttatccgtactcctgatgatgcatggttactcaccactgcgatccccggaaaaacagcattccaggtattagaagaatatcctgattcaggtgaaaatattgttgatgcgctggcagtgttcctgcgccggttgcattcgattcctgtttgtaattgtccttttaacagcgatcgcgtatttcgtctcgctcaggcgcaatcacgaatgaataacggtttggttgatgcgagtgattttgatgacgagcgtaatggctggcctgttgaacaagtctggaaagaaatgcataaacttttgccattctcaccggattcagtcgtcactcatggtgatttctcacttgataaccttatttttgacgaggggaaattaataggttgtattgatgttggacgagtcggaatcgcagaccgataccaggatcttgccatcctatggaactgcctcggtgagttttctccttcattacagaaacggctttttcaaaaatatggtattgataatcctgatatgaataaattgcagtttcatttgatgctcgatgagtttttctaatcagaattggttaattggttgtaacactggcagagcattacgctgacttgacgggacggcgcaagctcatgaccaaaatcccttaacgtgagttacgcgtcgttccactgagcgtcagaccccgtagaaaagatcaaaggatcttcttgagatcctttttttctgcgcgtaatctgctgcttgcaaacaaaaaaaccaccgctaccagcggtggtttgtttgccggatcaagagctaccaactctttttccgaaggtaactggcttcagcagagcgcagataccaaatactgtccttctagtgtagccgtagttaggccaccacttcaagaactctgtagcaccgcctacatacctcgctctgctaatcctgttaccagtggctgctgccagtggcgataagtcgtgtcttaccgggttggactcaagacgatagttaccggataaggcgcagcggtcgggctgaacggggggttcgtgcacacagcccagcttggagcgaacgacctacaccgaactgagatacctacagcgtgagcattgagaaagcgccacgcttcccgaagggagaaaggcggacaggtatccggtaagcggcagggtcggaacaggagagcgcacgagggagcttccagggggaaacgcctggtatctttatagtcctgtcgggtttcgccacctctgacttgagcgtcgatttttgtgatgctcgtcaggggggcggagcctatggaaaaacgccagcaacgcggcctttttacggttcctggccttttgctggccttttgct

SEQ ID NO: 47 - DNA, 3888 bp, Artificial Sequence
  pEQU6-shPDL1-H1-shVISTA
ctttcctgcgttatcccctgattctgtggataaccgtattaccgcctttgagtgagctgataccgctcgccgcagccgaacgaccgagcgcagcgagtcagtgagcgaggaagcggaagagcgcccaatacgcaaaccgcctctccccgcgcgttggccgattcattaatgcagctggcacgacaggtttcccgactggaaagcgggcagtgagcgcaacgcaattaatacgcgtaccgctagccaggaagagtttgtagaaacgcaaaaaggccatccgtcaggatggccttctgcttagtttgatgcctggcagtttatggcgggcgtcctgcccgccaccctccgggccgttgcttcacaacgttcaaatccgctcccggcggatttgtcctactcaggagagcgttcaccgacaaacaacagataaaacgaaaggcccagtcttccgactgagcctttcgttttatttgatgcctggcagttccctactctcgcgttaacgctagcatggatgttttcccagtcacgacgttgtaaaacgacggccagtcttaagctcgggccccaaataatgattttattttgactgatagtgacctgttcgttgcaacaaattgatgagcaatgcttttttataatgccaactttgtacaaaaaagcaggctttaaaggaaccaattcagtcgagaattggtaccatatttgcatgtcgctatgtgttctgggaaatcaccataaacgtgaaatgtctttggatttgggaatcttataagttctgtatgagaccactccctaggaccaccatggcaacttcttctagagagaagttgccatggtggtcttttttcgacagatctggcgcgccatagtggccagcggccgcaggtaagccagcccaggcctcgccctccagctcaaggcgggacaggtgccctagagtagcctgcatccagggacaggccccagccgggtgctgacacgtccacctccatctcttcctcaggtctgcccgggtggcatccctgtgacccctccccagtgcctctcctggccctggaagttgccactccagtgcccaccagccttgtcctaataaaattaagttgcatcattttgtctgactaggtgtccttctataatattatggggtggaggggggtggtatggagcaaggggcccaagttaacttgtttattgcagcttataatggttacaaataaagcaatagcatcacaaatttcacaaataaagcatttttttcactgcattctagttgtggtttgtccaaactcatcaatgtatcttatcatgtctggatccaaggtcgggcaggaagagggcctatttcccatgattccttcatatttgcatatacgatacaaggctgttagagagataattagaattaatttgactgtaaacacaaagatattagtacaaaatacgtgacgtagaaagtaataatttcttgggtagtttgcagttttaaaattatgttttaaaatggactatcatatgcttaccgtaacttgaaagtatttcgatttcttggctttatatatcttgtggaaaggacgaaactaggtagagtatggtagcaatatctagagtattgctaccatactctacttttttcgagtagctagagaattcatggtaatagcgatgactaatacgtagatgtactgccaagtaggaaagtcccataaggtcatgtactgggcataatgccaggcgggccatttaccgtcattgacgtcaatagggggcgtacttggcatatgatacacttgatgtactgccaagtgggcagtttaccgtaaatagtccacccattgacgtcaatggaaagtccctattggcgttactatgggaacatacgtcattattgacgtcaatgggcgggggtcgttgggcggtcagccaggcgggccatttaccgtaagttatgtaacgcggaactccatatatgggctatgaactaatgaccccgtaattgattactattaataactagacccagctttcttgtacaaagttggcattataagaaagcattgcttatcaatttgttgcaacgaacaggtcactatcagtcaaaataaaatcattatttgccatccagctgatatcccctatagtgagtcgtattacatggtcatagctgtttcctggcagctctggcccgtgtctcaaaatctctgatgttacattgcacaagataaaaatatatcatcatgaacaataaaactgtctgcttacataaacagtaatacaaggggtgttatgagccatattcaacgggaaacgtcgaggccgcgattaaattccaacatggatgctgatttatatgggtataaatgggctcgcgataatgtcgggcaatcaggtgcgacaatctatcgcttgtatgggaagcccgatgcgccagagttgtttctgaaacatggcaaaggtagcgttgccaatgatgttacagatgagatggtcagactaaactggctgacggaatttatgcctcttccgaccatcaagcattttatccgtactcctgatgatgcatggttactcaccactgcgatccccggaaaaacagcattccaggtattagaagaatatcctgattcaggtgaaaatattgttgatgcgctggcagtgttcctgcgccggttgcattcgattcctgtttgtaattgtccttttaacagcgatcgcgtatttcgtctcgctcaggcgcaatcacgaatgaataacggtttggttgatgcgagtgattttgatgacgagcgtaatggctggcctgttgaacaagtctggaaagaaatgcataaacttttgccattctcaccggattcagtcgtcactcatggtgatttctcacttgataaccttatttttgacgaggggaaattaataggttgtattgatgttggacgagtcggaatcgcagaccgataccaggatcttgccatcctatggaactgcctcggtgagttttctccttcattacagaaacggctttttcaaaaatatggtattgataatcctgatatgaataaattgcagtttcatttgatgctcgatgagtttttctaatcagaattggttaattggttgtaacactggcagagcattacgctgacttgacgggacggcgcaagctcatgaccaaaatcccttaacgtgagttacgcgtcgttccactgagcgtcagaccccgtagaaaagatcaaaggatcttcttgagatcctttttttctgcgcgtaatctgctgcttgcaaacaaaaaaaccaccgctaccagcggtggtttgtttgccggatcaagagctaccaactctttttccgaaggtaactggcttcagcagagcgcagataccaaatactgtccttctagtgtagccgtagttaggccaccacttcaagaactctgtagcaccgcctacatacctcgctctgctaatcctgttaccagtggctgctgccagtggcgataagtcgtgtcttaccgggttggactcaagacgatagttaccggataaggcgcagcggtcgggctgaacggggggttcgtgcacacagcccagcttggagcgaacgacctacaccgaactgagatacctacagcgtgagcattgagaaagcgccacgcttcccgaagggagaaaggcggacaggtatccggtaagcggcagggtcggaacaggagagcgcacgagggagcttccagggggaaacgcctggtatctttatagtcctgtcgggtttcgccacctctgacttgagcgtcgatttttgtgatgctcgtcaggggggcggagcctatggaaaaacgccagcaacgcggcctttttacggttcctggccttttgctggccttttgct

SEQ ID NO: 48 - DNA, 1104 bp, Salmonella typhimurium
  Strain LT2 Aspartate-semialdehyde dehydrogenase (asd)
atgaaaaatgttggttttatcggctggcgcggaatggtcggctctgttctcatgcaacgcatggtagaggagcgcgatttcgacgctattcgccctgttttcttttctacctcccagtttggacaggcggcgcccaccttcggcgacacctccaccggcacgctacaggacgcttttgatctggatgcgctaaaagcgctcgatatcatcgtgacctgccagggcggcgattataccaacgaaatttatccaaagctgcgcgaaagcggatggcagggttactggattgatgcggcttctacgctgcgcatgaaagatgatgccattattattctcgacccggtcaaccaggacgtgattaccgacggcctgaacaatggcgtgaagacctttgtgggcggtaactgtaccgttagcctgatgttgatgtcgctgggcggtctctttgcccataatctcgttgactgggtatccgtcgcgacctatcaggccgcctccggcggcggcgcgcgccatatgcgcgagctgttaacccagatgggtcagttgtatggccatgtcgccgatgaactggcgacgccgtcttccgcaattcttgatattgaacgcaaagttacggcattgacccgcagcggcgagctgccggttgataactttggcgtaccgctggcgggaagcctgatcccctggatcgacaaacagctcgataacggccagagccgcgaagagtggaaaggccaggcggaaaccaacaagattctcaatactgcctctgtgattccggttgatggtttgtgtgtgcgcgtcggcgcgctgcgctgtcacagccaggcgttcaccatcaagctgaaaaaagaggtatccattccgacggtggaagaactgctggcggcacataatccgtgggcgaaagtggtgccgaacgatcgtgatatcactatgcgcgaattaaccccggcggcggtgaccggcacgttgactacgccggttggtcgtctgcgtaagctgaacatggggccagagttcttgtcggcgtttaccgtaggcgaccagttgttatggggcgccgccgagccgctgcgtcgaatgctgcgccagttggcg

SEQ ID NO: 49 - DNA, 861 bp, Salmonella typhimurium
  Strain LT2 TSX
atgaaaaaaactttactcgcagtcagcgcagcgctggcgctcacctcatcttttactgctaacgcagcagaaaatgatcagccgcagtatttgtccgactggtggcaccagagcgtaaacgtggtaggcagctaccatacccgtttctcgccgaaattgaacaacgacgtctatctggaatatgaagcatttgccaaaaaagactggtttgatttctacggctatatcgatattcccaaaacctttgattggggtaacggcaacgataaaggtatctggtccgacggttctccgctgttcatggaaatcgaaccgcgtttctcaattgataagctgaccggcgcagacctgagcttcggcccgtttaaagagtggtatttcgccaacaactacatctacgatatgggcgataacaaagccagccgccagagcacgtggtatatgggtctggggaccgatatcgacaccggcctgccgatgggtctgtcgctgaacgtgtatgcgaaatatcagtggcaaaactacggcgcgtccaatgaaaacgaatgggacggctaccgtttcaaagtgaaatacttcgtccccatcaccgatctgtggggcggtaaactgagctatatcggctttaccaactttgactggggatctgatttaggcgacgatccgaaccgtaccagcaactccatcgcttccagccatatcctggcgctgaactacgatcactggcactactcggtcgttgcgcgttacttccataacggcggacagtggcagaatggcgcaaaactgaactggggcgacggcgatttcagcgcgaaatctaccggctggggcggctacctggtcgtgggttacaacttc

SEQ ID NO: 50 - DNA, 864 bp, Homo sapiens
  programmed cell death protein 1 (PD-1)
atgcagatcccacaggcgccctggccagtcgtctgggcggtgctacaactgggctggcggccaggatggttcttagactccccagacaggccctggaacccccccaccttctccccagccctgctcgtggtgaccgaaggggacaacgccaccttcacctgcagcttctccaacacatcggagagcttcgtgctaaactggtaccgcatgagccccagcaaccagacggacaagctggccgccttccccgaggaccgcagccagcccggccaggactgccgcttccgtgtcacacaactgcccaacgggcgtgacttccacatgagcgtggtcagggcccggcgcaatgacagcggcacctacctctgtggggccatctccctggcccccaaggcgcagatcaaagagagcctgcgggcagagctcagggtgacagagagaagggcagaagtgcccacagcccaccccagcccctcacccaggccagccggccagttccaaaccctggtggttggtgtcgtgggcggcctgctgggcagcctggtgctgctagtctgggtcctggccgtcatctgctcccgggccgcacgagggacaataggagccaggcgcaccggccagcccctgaaggaggacccctcagccgtgcctgtgttctctgtggactatggggagctggatttccagtggcgagagaagaccccggagccccccgtgccctgtgtccctgagcagacggagtatgccaccattgtctttcctagcggaatgggcacctcatcccccgcccgcaggggctcagctgacggccctcggagtgcccagccactgaggcctgaggatggacactgctcttggcccctc

SEQ ID NO: 51 - DNA, 933 bp, Homo sapiens
  programmed cell death protein 2 (PD-2), isoform 1
atggctgccgccggggccaggcctgtggagctgggcttcgccgagtcggcgccggcgtggcgactgcgcagcgagcagttccccagcaaggtgtatgcgccgctgcctggccgcccggacgccttccaccgctgcatcttcctcttctgctgccgcgagcagccgtgctgtgccggcctgcgagtttttaggaatcaactacccaggaaaaacgatttttactcatatgagccaccttctgagaatcctcccccagaaacaggagaatcagtgtgtctccagcttaagtctggtgctcatctctgcagggtttgtggctgtttaggccccaaaacgtgctccagatgccacaaagcatattactgcagcaaggagcatcagaccctagactggagattgggacataagcaggcttgtgcacaaccagatcatctggaccatataattccagaccacaacttcctttttccagaatttgaaattgtaatagaaacagaagatgagattatgcctgaggttgtggaaaaggaagattactcagagattatagggagcatgggtgaagcacttgaggaagaactggattccatggcaaaacatgaatccagggaagataaaatttttcagaagtttaaaactcagatagcccttgaaccagaacagattcttagatatggcagaggtattgcccccatctggatttctggtgaaaatattcctcaagaaaaggatattccagattgcccctgtggtgccaagagaatattggaattccaggtcatgcctcagctcctaaactacctgaaggctgacagactgggcaagagcattgactggggcatcctggctgtcttcacctgtgctgagagctgcagcttgggtactggctatacagaagaatttgtgtggaagcaggatgtaacagatacaccg

SEQ ID NO: 52 - DNA, 819 bp, Homo sapiens
  programmed death-ligand 2 (PD-L2), isoform 1
atgatcttcctcctgctaatgttgagcctggaattgcagcttcaccagatagcagctttattcacagtgacagtccctaaggaactgtacataatagagcatggcagcaatgtgaccctggaatgcaactttgacactggaagtcatgtgaaccttggagcaataacagccagtttgcaaaaggtggaaaatgatacatccccacaccgtgaaagagccactttgctggaggagcagctgcccctagggaaggcctcgttccacatacctcaagtccaagtgagggacgaaggacagtaccaatgcataatcatctatggggtcgcctgggactacaagtacctgactctgaaagtcaaagcttcctacaggaaaataaacactcacatcctaaaggttccagaaacagatgaggtagagctcacctgccaggctacaggttatcctctggcagaagtatcctggccaaacgtcagcgttcctgccaacaccagccactccaggacccctgaaggcctctaccaggtcaccagtgttctgcgcctaaagccaccccctggcagaaacttcagctgtgtgttctggaatactcacgtgagggaacttactttggccagcattgaccttcaaagtcagatggaacccaggacccatccaacttggctgcttcacattttcatcccctcctgcatcattgctttcattttcatagccacagtgatagccctaagaaaacaactctgtcaaaagctgtattcttcaaaagacacaacaaaaagacctgtcaccacaacaaagagggaagtgaacagtgctatc

SEQ ID NO: 53 - DNA, 669 bp, Homo sapiens
  cytotoxic T-lymphocyte-associated protein 4 (CTLA-4), isoform 1
atggcttgccttggatttcagcggcacaaggctcagctgaacctggctaccaggacctggccctgcactctcctgttttttcttctcttcatccctgtcttctgcaaagcaatgcacgtggcccagcctgctgtggtactggccagcagccgaggcatcgccagctttgtgtgtgagtatgcatctccaggcaaagccactgaggtccgggtgacagtgcttcggcaggctgacagccaggtgactgaagtctgtgcggcaacctacatgatggggaatgagttgaccttcctagatgattccatctgcacgggcacctccagtggaaatcaagtgaacctcactatccaaggactgagggccatggacacgggactctacatctgcaaggtggagctcatgtacccaccgccatactacctgggcataggcaacggaacccagatttatgtaattgatccagaaccgtgcccagattctgacttcctcctctggatccttgcagcagttagttcggggttgtttttttatagctttctcctcacagctgtttctttgagcaaaatgctaaagaaaagaagccctcttacaacaggggtctatgtgaaaatgcccccaacagagccagaatgtgaaaagcaatttcagccttattttattcccatcaat

SEQ ID NO: 54 - DNA, 969 bp, Homo sapiens
  CD47 transcript variant 1
atgtggcccctggtagcggcgctgttgctgggctcggcgtgctgcggatcagctcagctactatttaataaaacaaaatctgtagaattcacgttttgtaatgacactgtcgtcattccatgctttgttactaatatggaggcacaaaacactactgaagtatacgtaaagtggaaatttaaaggaagagatatttacacctttgatggagctctaaacaagtccactgtccccactgactttagtagtgcaaaaattgaagtctcacaattactaaaaggagatgcctctttgaagatggataagagtgatgctgtctcacacacaggaaactacacttgtgaagtaacagaattaaccagagaaggtgaaacgatcatcgagctaaaatatcgtgttgtttcatggttttctccaaatgaaaatattcttattgttattttcccaatttttgctatactcctgttctggggacagtttggtattaaaacacttaaatatagatccggtggtatggatgagaaaacaattgctttacttgttgctggactagtgatcactgtcattgtcattgttggagccattcttttcgtcccaggtgaatattcattaaagaatgctactggccttggtttaattgtgacttctacagggatattaatattacttcactactatgtgtttagtacagcgattggattaacctccttcgtcattgccatattggttattcaggtgatagcctatatcctcgctgtggttggactgagtctctgtattgcggcgtgtataccaatgcatggccctcttctgatttcaggtttgagtatcttagctctagcacaattacttggactagtttatatgaaatttgtggcttccaatcagaagactatacaacctcctaggaaagctgtagaggaaccccttaatgcattcaaagaatcaaaaggaatgatgaatgatgaa

SEQ ID NO: 55 - DNA, 1209 bp, Homo sapiens
  indoleamine 2,3-dioxygenase (IDO) 1
atggcacacgctatggaaaactcctggacaatcagtaaagagtaccatattgatgaagaagtgggctttgctctgccaaatccacaggaaaatctacctgatttttataatgactggatgttcattgctaaacatctgcctgatctcatagagtctggccagcttcgagaaagagttgagaagttaaacatgctcagcattgatcatctcacagaccacaagtcacagcgccttgcacgtctagttctgggatgcatcaccatggcatatgtgtggggcaaaggtcatggagatgtccgtaaggtcttgccaagaaatattgctgttccttactgccaactctccaagaaactggaactgcctcctattttggtttatgcagactgtgtcttggcaaactggaagaaaaaggatcctaataagcccctgacttatgagaacatggacgttttgttctcatttcgtgatggagactgcagtaaaggattcttcctggtctctctattggtggaaatagcagctgcttctgcaatcaaagtaattcctactgtattcaaggcaatgcaaatgcaagaacgggacactttgctaaaggcgctgttggaaatagcttcttgcttggagaaagcccttcaagtgtttcaccaaatccacgatcatgtgaacccaaaagcatttttcagtgttcttcgcatatatttgtctggctggaaaggcaacccccagctatcagacggtctggtgtatgaaaggttctgggaagacccaaaggagtttgcagggggcagtgcaggccaaagcagcgtctttcagtgctttgacgtcctgctgggcatccagcagactgctggtggaggacatgctgctcagttcctccaggacatgagaagatatatgccaccagctcacaggaacttcctgtgctcattagagtcaaatccctcagtccgtgagtttgtcctttcaaaaggtgatgctggcctgcgggaagcttatgacgcctgtgtgaaagctctggtctccctgaggagctaccatctgcaaatcgtgactaagtacatcctgattcctgcaagccagcagccaaaggagaataagacctctgaagacccttcaaaactggaagccaaaggaactggaggcactgatttaatgaatttcctgaagactgtaagaagtacaactgagaaatcccttttgaaggaaggt

SEQ ID NO: 56 - DNA, 1260 bp, Homo sapiens
  indoleamine 2,3-dioxygenase (IDO) 2
atgttgcattttcattattatgatacttcaaacaaaataatggagccccacagaccgaatgtgaagacagcagtgccattgtctttggaaagctatcacatatctgaagagtatggctttcttcttccagattctctgaaagaacttccagatcattataggccttggatggaaattgccaacaaacttcctcaattgattgatgctcaccagcttcaagctcatgtggacaagatgcccctgctgagctgccagttcctgaagggtcaccgggagcagcgcctggcccacctggtcctgagcttcctcaccatgggttatgtctggcaggaaggagaggcgcagcctgcagaggtcctgccaaggaatcttgcccttccatttgtcgaagtctccaggaacttggggctccctcctatcctggtccactcagacttggtgctgacgaactggaccaaaaaagatccagacggattcctggaaattgggaacctggagaccatcatctcatttcctgggggagagagcctgcatggttttatactggtgactgctttggtagagaaagaagcagtgcctgggataaaggctcttgttcaggccacgaatgctatcttgcagcccaaccaggaggccctgctccaagccctgcagcgactgagactgtctattcaggacatcaccaaaaccttaggacagatgcatgattatgtagatccagacatattttatgcaggcatccggatctttctctctggatggaaagacaacccagcaatgcctgcagggctgatgtatgaaggagtttcccaagagcccctgaaatactccggcgggagtgcagctcagagcacagtgcttcatgcctttgatgagttcttaggcattcgtcatagcaaggaaagtggtgactttctgtacagaatgagggattacatgcctccttcccataaggccttcatagaagacatccactcagcaccttccctgagggactacatcctgtcatctggacaggaccacttgctgacagcttataaccagtgtgtgcaggccctggcagagctgcggagctatcacatcaccatggtcaccaaatacctcatcacagctgcagccaaggcaaagcatgggaagccaaaccatctcccagggcctcctcaggctttaaaagacaggggcacaggtggaaccgcagttatgagctttcttaagagtgtcagggataagaccttggagtcaatccttcacccacgtggt

SEQ ID NO: 57 - DNA, 2310 bp, Homo sapiens
  signal transducer and activator of transcription 3 (STAT3)
atggcccaatggaatcagctacagcagcttgacacacggtacctggagcagctccatcagctctacagtgacagcttcccaatggagctgcggcagtttctggccccttggattgagagtcaagattgggcatatgcggccagcaaagaatcacatgccactttggtgtttcataatctcctgggagagattgaccagcagtatagccgcttcctgcaagagtcgaatgttctctatcagcacaatctacgaagaatcaagcagtttcttcagagcaggtatcttgagaagccaatggagattgcccggattgtggcccggtgcctgtgggaagaatcacgccttctacagactgcagccactgcggcccagcaagggggccaggccaaccaccccacagcagccgtggtgacggagaagcagcagatgctggagcagcaccttcaggatgtccggaagagagtgcaggatctagaacagaaaatgaaagtggtagagaatctccaggatgactttgatttcaactataaaaccctcaagagtcaaggagacatgcaagatctgaatggaaacaaccagtcagtgaccaggcagaagatgcagcagctggaacagatgctcactgcgctggaccagatgcggagaagcatcgtgagtgagctggcggggcttttgtcagcgatggagtacgtgcagaaaactctcacggacgaggagctggctgactggaagaggcggcaacagattgcctgcattggaggcccgcccaacatctgcctagatcggctagaaaactggataacgtcattagcagaatctcaacttcagacccgtcaacaaattaagaaactggaggagttgcagcaaaaagtttcctacaaaggggaccccattgtacagcaccggccgatgctggaggagagaatcgtggagctgtttagaaacttaatgaaaagtgcctttgtggtggagcggcagccctgcatgcccatgcatcctgaccggcccctcgtcatcaagaccggcgtccagttcactactaaagtcaggttgctggtcaaattccctgagttgaattatcagcttaaaattaaagtgtgcattgacaaagactctggggacgttgcagctctcagaggatcccggaaatttaacattctgggcacaaacacaaaagtgatgaacatggaagaatccaacaacggcagcctctctgcagaattcaaacacttgaccctgagggagcagagatgtgggaatgggggccgagccaattgtgatgcttccctgattgtgactgaggagctgcacctgatcacctttgagaccgaggtgtatcaccaaggcctcaagattgacctagagacccactccttgccagttgtggtgatctccaacatctgtcagatgccaaatgcctgggcgtccatcctgtggtacaacatgctgaccaacaatcccaagaatgtaaacttttttaccaagcccccaattggaacctgggatcaagtggccgaggtcctgagctggcagttctcctccaccaccaagcgaggactgagcatcgagcagctgactacactggcagagaaactcttgggacctggtgtgaattattcagggtgtcagatcacatgggctaaattttgcaaagaaaacatggctggcaagggcttctccttctgggtctggctggacaatatcattgaccttgtgaaaaagtacatcctggccctttggaacgaagggtacatcatgggctttatcagtaaggagcgggagcgggccatcttgagcactaagcctccaggcaccttcctgctaagattcagtgaaagcagcaaagaaggaggcgtcactttcacttgggtggagaaggacatcagcggtaagacccagatccagtccgtggaaccatacacaaagcagcagctgaacaacatgtcatttgctgaaatcatcatgggctataagatcatggatgctaccaatatcctggtgtctccactggtctatctctatcctgacattcccaaggaggaggcattcggaaagtattgtcggccagagagccaggagcatcctgaagctgacccaggtagcgctgccccatacctgaagaccaagtttatctgtgtgacaccaacgacctgcagcaataccattgacctgccgatgtccccccgcactttagattcattgatgcagtttggaaataatggtgaaggtgctgaaccctcagcaggagggcagtttgagtccctcacctttgacatggagttgacctcggagtgcgctacctcccccatg

SEQ ID NO: 58 - DNA, 1575 bp, Homo sapiens
  lymphocyte-activation gene 3 (LAG3)
atgtgggaggctcagttcctgggcttgctgtttctgcagccgctttgggtggctccagtgaagcctctccagccaggggctgaggtcccggtggtgtgggcccaggagggggctcctgcccagctcccctgcagccccacaatccccctccaggatctcagccttctgcgaagagcaggggtcacttggcagcatcagccagacagtggcccgcccgctgccgcccccggccatcccctggcccccggccctcacccggcggcgccctcctcctgggggcccaggccccgccgctacacggtgctgagcgtgggtcccggaggcctgcgcagcgggaggctgcccctgcagccccgcgtccagctggatgagcgcggccggcagcgcggggacttctcgctatggctgcgcccagcccggcgcgcggacgccggcgagtaccgcgccgcggtgcacctcagggaccgcgccctctcctgccgcctccgtctgcgcctgggccaggcctcgatgactgccagccccccaggatctctcagagcctccgactgggtcattttgaactgctccttcagccgccctgaccgcccagcctctgtgcattggttccggaaccggggccagggccgagtccctgtccgggagtccccccatcaccacttagcggaaagcttcctcttcctgccccaagtcagccccatggactctgggccctggggctgcatcctcacctacagagatggcttcaacgtctccatcatgtataacctcactgttctgggtctggagcccccaactcccttgacagtgtacgctggagcaggttccagggtggggctgccctgccgcctgcctgctggtgtggggacccggtctttcctcactgccaagtggactcctcctgggggaggccctgacctcctggtgactggagacaatggcgactttacccttcgactagaggatgtgagccaggcccaggctgggacctacacctgccatatccatctgcaggaacagcagctcaatgccactgtcacattggcaatcatcacagtgactcccaaatcctttgggtcacctggatccctggggaagctgctttgtgaggtgactccagtatctggacaagaacgctttgtgtggagctctctggacaccccatcccagaggagtttctcaggaccttggctggaggcacaggaggcccagctcctttcccagccttggcaatgccagctgtaccagggggagaggcttcttggagcagcagtgtacttcacagagctgtctagcccaggtgcccaacgctctgggagagccccaggtgccctcccagcaggccacctcctgctgtttctcatccttggtgtcctttctctgctccttttggtgactggagcctttggctttcacctttggagaagacagtggcgaccaagacgattttctgccttagagcaagggattcaccctccgcaggctcagagcaagatagaggagctggagcaagaaccggagccggagccggagccggaaccggagcccgagcccgagcccgagccggagcagctc

SEQ ID NO: 59 - DNA, 903 bp, Homo sapiens
  T cell immunoglobulin and mucin-domain containing-3 (TIM-3)
atgttttcacatcttccctttgactgtgtcctgctgctgctgctgctactacttacaaggtcctcagaagtggaatacagagcggaggtcggtcagaatgcctatctgccctgcttctacaccccagccgccccagggaacctcgtgcccgtctgctggggcaaaggagcctgtcctgtgtttgaatgtggcaacgtggtgctcaggactgatgaaagggatgtgaattattggacatccagatactggctaaatggggatttccgcaaaggagatgtgtccctgaccatagagaatgtgactctagcagacagtgggatctactgctgccggatccaaatcccaggcataatgaatgatgaaaaatttaacctgaagttggtcatcaaaccagccaaggtcacccctgcaccgactcggcagagagacttcactgcagcctttccaaggatgcttaccaccaggggacatggcccagcagagacacagacactggggagcctccctgatataaatctaacacaaatatccacattggccaatgagttacgggactctagattggccaatgacttacgggactctggagcaaccatcagaataggcatctacatcggagcagggatctgtgctgggctggctctggctcttatcttcggcgctttaattttcaaatggtattctcatagcaaagagaagatacagaatttaagcctcatctctttggccaacctccctccctcaggattggcaaatgcagtagcagagggaattcgctcagaagaaaacatctataccattgaagagaacgtatatgaagtggaggagcccaatgagtattattgctatgtcagcagcaggcagcaaccctcacaacctttgggttgtcgctttgcaatgcca

SEQ ID NO: 60 - DNA, 732 bp, Homo sapiens
  T cell immunoreceptor with Ig and ITIM domains (TIGIT), isoform 1
atgcgctggtgtctcctcctgatctgggcccaggggctgaggcaggctcccctcgcctcaggaatgatgacaggcacaatagaaacaacggggaacatttctgcagagaaaggtggctctatcatcttacaatgtcacctctcctccaccacggcacaagtgacccaggtcaactgggagcagcaggaccagcttctggccatttgtaatgctgacttggggtggcacatctccccatccttcaaggatcgagtggccccaggtcccggcctgggcctcaccctccagtcgctgaccgtgaacgatacaggggagtacttctgcatctatcacacctaccctgatgggacgtacactgggagaatcttcctggaggtcctagaaagctcagtggctgagcacggtgccaggttccagattccattgcttggagccatggccgcgacgctggtggtcatctgcacagcagtcatcgtggtggtcgcgttgactagaaagaagaaagccctcagaatccattctgtggaaggtgacctcaggagaaaatcagctggacaggaggaatggagccccagtgctccctcacccccaggaagctgtgtccaggcagaagctgcacctgctgggctctgtggagagcagcggggagaggactgtgccgagctgcatgactacttcaatgtcctgagttacagaagcctgggtaactgcagcttcttcacagagactggt

SEQ ID NO: 61 - DNA, 1065 bp, Homo sapiens
  GALECTIN-9/LGALS9, isoform 1
atggccttcagcggttcccaggctccctacctgagtccagctgtccccttttctgggactattcaaggaggtctccaggacggacttcagatcactgtcaatgggaccgttctcagctccagtggaaccaggtttgctgtgaactttcagactggcttcagtggaaatgacattgccttccacttcaaccctcggtttgaagatggagggtacgtggtgtgcaacacgaggcagaacggaagctgggggcccgaggagaggaagacacacatgcctttccagaaggggatgccctttgacctctgcttcctggtgcagagctcagatttcaaggtgatggtgaacgggatcctcttcgtgcagtacttccaccgcgtgcccttccaccgtgtggacaccatctccgtcaatggctctgtgcagctgtcctacatcagcttccagaacccccgcacagtccctgttcagcctgccttctccacggtgccgttctcccagcctgtctgtttcccacccaggcccagggggcgcagacaaaaacctcccggcgtgtggcctgccaacccggctcccattacccagacagtcatccacacagtgcagagcgcccctggacagatgttctctactcccgccatcccacctatgatgtacccccaccccgcctatccgatgcctttcatcaccaccattctgggagggctgtacccatccaagtccatcctcctgtcaggcactgtcctgcccagtgctcagaggttccacatcaacctgtgctctgggaaccacatcgccttccacctgaacccccgttttgatgagaatgctgtggtccgcaacacccagatcgacaactcctgggggtctgaggagcgaagtctgccccgaaaaatgcccttcgtccgtggccagagcttctcagtgtggatcttgtgtgaagctcactgcctcaaggtggccgtggatggtcagcacctgtttgaatactaccatcgcctgaggaacctgcccaccatcaacagactggaagtggggggcgacatccagctgacccatgtgcagaca

SEQ ID NO: 62 - DNA, 720 bp, Homo sapiens
  LIGHT/TNSF14
atggaggagagtgtcgtacggccctcagtgtttgtggtggatggacagaccgacatcccattcacgaggctgggacgaagccaccggagacagtcgtgcagtgtggcccgggtgggtctgggtctcttgctgttgctgatgggggccgggctggccgtccaaggctggttcctcctgcagctgcactggcgtctaggagagatggtcacccgcctgcctgacggacctgcaggctcctgggagcagctgatacaagagcgaaggtctcacgaggtcaacccagcagcgcatctcacaggggccaactccagcttgaccggcagcggggggccgctgttatgggagactcagctgggcctggccttcctgaggggcctcagctaccacgatggggcccttgtggtcaccaaagctggctactactacatctactccaaggtgcagctgggcggtgtgggctgcccgctgggcctggccagcaccatcacccacggcctctacaagcgcacaccccgctaccccgaggagctggagctgttggtcagccagcagtcaccctgcggacgggccaccagcagctcccgggtctggtgggacagcagcttcctgggtggtgtggtacacctggaggctggggagaaggtggtcgtccgtgtgctggatgaacgcctggttcgactgcgtgatggtacccggtcttacttcggggctttcatggtg

SEQ ID NO: 63 - DNA, 849 bp, Homo sapiens
  HVEM/TNSFR14 (receptor for LIGHT ligand)
atggagcctcctggagactgggggcctcctccctggagatccacccccaaaaccgacgtcttgaggctggtgctgtatctcaccttcctgggagccccctgctacgccccagctctgccgtcctgcaaggaggacgagtacccagtgggctccgagtgctgccccaagtgcagtccaggttatcgtgtgaaggaggcctgcggggagctgacgggcacagtgtgtgaaccctgccctccaggcacctacattgcccacctcaatggcctaagcaagtgtctgcagtgccaaatgtgtgacccagccatgggcctgcgcgcgagccggaactgctccaggacagagaacgccgtgtgtggctgcagcccaggccacttctgcatcgtccaggacggggaccactgcgccgcgtgccgcgcttacgccacctccagcccgggccagagggtgcagaagggaggcaccgagagtcaggacaccctgtgtcagaactgccccccggggaccttctctcccaatgggaccctggaggaatgtcagcaccagaccaagtgcagctggctggtgacgaaggccggagctgggaccagcagctcccactgggtatggtggtttctctcagggagcctcgtcatcgtcattgtttgctccacagttggcctaatcatatgtgtgaaaagaagaaagccaaggggtgatgtagtcaaggtgatcgtctccgtccagcggaaaagacaggaggcagaaggtgaggccacagtcattgaggccctgcaggcccctccggacgtcaccacggtggccgtggaggagacaataccctcattcacggggaggagcccaaaccac

SEQ ID NO: 64 - DNA, 660 bp, Homo sapiens
  CD28
atgctcaggctgctcttggctctcaacttattcccttcaattcaagtaacaggaaacaagattttggtgaagcagtcgcccatgcttgtagcgtacgacaatgcggtcaaccttagctgcaagtattcctacaatctcttctcaagggagttccgggcatcccttcacaaaggactggatagtgctgtggaagtctgtgttgtatatgggaattactcccagcagcttcaggtttactcaaaaacggggttcaactgtgatgggaaattgggcaatgaatcagtgacattctacctccagaatttgtatgttaaccaaacagatatttacttctgcaaaattgaagttatgtatcctcctccttacctagacaatgagaagagcaatggaaccattatccatgtgaaagggaaacacctttgtccaagtcccctatttcccggaccttctaagcccttttgggtgctggtggtggttggtggagtcctggcttgctatagcttgctagtaacagtggcctttattattttctgggtgaggagtaagaggagcaggctcctgcacagtgactacatgaacatgactccccgccgccccgggcccacccgcaagcattaccagccctatgccccaccacgcgacttcgcagcctatcgctcc

SEQ ID NO: 65 - DNA, 1578 bp, Homo sapiens
  carcinoembryonic antigen-related cell adhesion molecule 1 (CEACAM1, or CD66a)
atggggcacctctcagccccacttcacagagtgcgtgtaccctggcaggggcttctgctcacagcctcacttctaaccttctggaacccgcccaccactgcccagctcactactgaatccatgccattcaatgttgcagaggggaaggaggttcttctccttgtccacaatctgccccagcaactttttggctacagctggtacaaaggggaaagagtggatggcaaccgtcaaattgtaggatatgcaataggaactcaacaagctaccccagggcccgcaaacagcggtcgagagacaatataccccaatgcatccctgctgatccagaacgtcacccagaatgacacaggattctacaccctacaagtcataaagtcagatcttgtgaatgaagaagcaactggacagttccatgtatacccggagctgcccaagccctccatctccagcaacaactccaaccctgtggaggacaaggatgctgtggccttcacctgtgaacctgagactcaggacacaacctacctgtggtggataaacaatcagagcctcccggtcagtcccaggctgcagctgtccaatggcaacaggaccctcactctactcagtgtcacaaggaatgacacaggaccctatgagtgtgaaatacagaacccagtgagtgcgaaccgcagtgacccagtcaccttgaatgtcacctatggcccggacacccccaccatttccccttcagacacctattaccgtccaggggcaaacctcagcctctcctgctatgcagcctctaacccacctgcacagtactcctggcttatcaatggaacattccagcaaagcacacaagagctctttatccctaacatcactgtgaataatagtggatcctatacctgccacgccaataactcagtcactggctgcaacaggaccacagtcaagacgatcatagtcactgagctaagtccagtagtagcaaagccccaaatcaaagccagcaagaccacagtcacaggagataaggactctgtgaacctgacctgctccacaaatgacactggaatctccatccgttggttcttcaaaaaccagagtctcccgtcctcggagaggatgaagctgtcccagggcaacaccaccctcagcataaaccctgtcaagagggaggatgctgggacgtattggtgtgaggtcttcaacccaatcagtaagaaccaaagcgaccccatcatgctgaacgtaaactataatgctctaccacaagaaaatggcctctcacctggggccattgctggcattgtgattggagtagtggccctggttgctctgatagcagtagccctggcatgttttctgcatttcgggaagaccggcagggcaagcgaccagcgtgatctcacagagcacaaaccctcagtctccaaccacactcaggaccactccaatgacccacctaacaagatgaatgaagttacttattctaccctgaactttgaagcccagcaacccacacaaccaacttcagcctccccatccctaacagccacagaaataatttattcagaagtaaaaaagcag

SEQ ID NO: 66 - DNA, 864 bp, Homo sapiens
  CD80/B7-1
atgggccacacacggaggcagggaacatcaccatccaagtgtccatacctcaatttctttcagctcttggtgctggctggtctttctcacttctgttcaggtgttatccacgtgaccaaggaagtgaaagaagtggcaacgctgtcctgtggtcacaatgtttctgttgaagagctggcacaaactcgcatctactggcaaaaggagaagaaaatggtgctgactatgatgtctggggacatgaatatatggcccgagtacaagaaccggaccatctttgatatcactaataacctctccattgtgatcctggctctgcgcccatctgacgagggcacatacgagtgtgttgttctgaagtatgaaaaagacgctttcaagcgggaacacctggctgaagtgacgttatcagtcaaagctgacttccctacacctagtatatctgactttgaaattccaacttctaatattagaaggataatttgctcaacctctggaggttttccagagcctcacctctcctggttggaaaatggagaagaattaaatgccatcaacacaacagtttcccaagatcctgaaactgagctctatgctgttagcagcaaactggatttcaatatgacaaccaaccacagcttcatgtgtctcatcaagtatggacatttaagagtgaatcagaccttcaactggaatacaaccaagcaagagcattttcctgataacctgctcccatcctgggccattaccttaatctcagtaaatggaatttttgtgatatgctgcctgacctactgctttgccccaagatgcagagagagaaggaggaatgagagattgagaagggaaagtgtacgccctgta

SEQ ID NO: 67 - DNA, 995 bp, Homo sapiens
  CD86/B7-2
cagccaaaatggatccccagtgcactatgggactgagtaacattctctttgtgatggccttcctgctctctggtgctgctcctctgaagattcaagcttatttcaatgagactgcagacctgccatgccaatttgcaaactctcaaaaccaaagcctgagtgagctagtagtattttggcaggaccaggaaaacttggttctgaatgaggtatacttaggcaaagagaaatttgacagtgttcattccaagtatatgggccgcacaagttttgattcggacagttggaccctgagacttcacaatcttcagatcaaggacaagggcttgtatcaatgtatcatccatcacaaaaagcccacaggaatgattcgcatccaccagatgaattctgaactgtcagtgcttgctaacttcagtcaacctgaaatagtaccaatttctaatataacagaaaatgtgtacataaatttgacctgctcatctatacacggttacccagaacctaagaagatgagtgttttgctaagaaccaagaattcaactatcgagtatgatggtattatgcagaaatctcaagataatgtcacagaactgtacgacgtttccatcagcttgtctgtttcattccctgatgttacgagcaatatgaccatcttctgtattctggaaactgacaagacgcggcttttatcttcacctttctctatagagcttgaggaccctcagcctcccccagaccacattccttggattacagctgtacttccaacagttattatatgtgtgatggttttctgtctaattctatggaaatggaagaagaagaagcggcctcgcaactcttataaatgtggaaccaacacaatggagagggaagagagtgaacagaccaagaaaagagaaaaaatccatatacctgaaagatctgatgaagcccagcgtgtttttaaaagttcgaagacatcttcatgcgacaaaagtgatacatgtttt

SEQ ID NO: 68 - DNA, 1095 bp, Homo sapiens
  CD244/2B4
atgctggggcaagtggtcaccctcatactcctcctgctcctcaaggtgtatcagggcaaaggatgccagggatcagctgaccatgtggttagcatctcgggagtgcctcttcagttacaaccaaacagcatacagacgaaggttgacagcattgcatggaagaagttgctgccctcacaaaatggatttcatcacatattgaagtgggagaatggctctttgccttccaatacttccaatgatagattcagttttatagtcaagaacttgagtcttctcatcaaggcagctcagcagcaggacagtggcctctactgcctggaggtcaccagtatatctggaaaagttcagacagccacgttccaggtttttgtatttgataaagttgagaaaccccgcctacaggggcaggggaagatcctggacagagggagatgccaagtggctctgtcttgcttggtctccagggatggcaatgtgtcctatgcttggtacagagggagcaagctgatccagacagcagggaacctcacctacctggacgaggaggttgacattaatggcactcacacatatacctgcaatgtcagcaatcctgttagctgggaaagccacaccctgaatctcactcaggactgtcagaatgcccatcaggaattcagattttggccgtttttggtgatcatcgtgattctaagcgcactgttccttggcacccttgcctgcttctgtgtgtggaggagaaagaggaaggagaagcagtcagagaccagtcccaaggaatttttgacaatttacgaagatgtcaaggatctgaaaaccaggagaaatcacgagcaggagcagacttttcctggaggggggagcaccatctactctatgatccagtcccagtcttctgctcccacgtcacaagaacctgcatatacattatattcattaattcagccttccaggaagtctggatccaggaagaggaaccacagcccttccttcaatagcactatctatgaagtgattggaaagagtcaacctaaagcccagaaccctgctcgattgagccgcaaagagctggagaactttgatgtttattcc

SEQ ID NO: 69 - DNA, 1251 bp, Homo sapiens
  CD155/PVR
atggcccgagccatggccgccgcgtggccgctgctgctggtggcgctactggtgctgtcctggccacccccaggaaccggggacgtcgtcgtgcaggcgcccacccaggtgcccggcttcttgggcgactccgtgacgctgccctgctacctacaggtgcccaacatggaggtgacgcatgtgtcacagctgacttgggcgcggcatggtgaatctggcagcatggccgtcttccaccaaacgcagggccccagctattcggagtccaaacggctggaattcgtggcagccagactgggcgcggagctgcggaatgcctcgctgaggatgttcgggttgcgcgtagaggatgaaggcaactacacctgcctgttcgtcacgttcccgcagggcagcaggagcgtggatatctggctccgagtgcttgccaagccccagaacacagctgaggttcagaaggtccagctcactggagagccagtgcccatggcccgctgcgtctccacagggggtcgcccgccagcccaaatcacctggcactcagacctgggcgggatgcccaatacgagccaggtgccagggttcctgtctggcacagtcactgtcaccagcctctggatattggtgccctcaagccaggtggacggcaagaatgtgacctgcaaggtggagcacgagagctttgagaagcctcagctgctgactgtgaacctcaccgtgtactaccccccagaggtatccatctctggctatgataacaactggtaccttggccagaatgaggccaccctgacctgcgatgctcgcagcaacccagagcccacaggctataattggagcacgaccatgggtcccctgccaccctttgctgtggcccagggcgcccagctcctgatccgtcctgtggacaaaccaatcaacacaactttaatctgcaacgtcaccaatgccctaggagctcgccaggcagaactgaccgtccaggtcaaagagggacctcccagtgagcactcaggcatgtcccgtaacgccatcatcttcctggttctgggaatcctggtttttctgatcctgctggggatcgggatttatttctattggtccaaatgttcccgtgaggtcctttggcactgtcatctgtgtccctcgagtacagagcatgccagcgcctcagctaatgggcatgtctcctattcagctgtgagcagagagaacagctcttcccaggatccacagacagagggcacaagg

SEQ ID NO: 70 - DNA, 1614 bp, Homo sapiens
  CD122/nectin-2
atggcccgggccgctgccctcctgccgtcgagatcgccgccgacgccgctgctgtggccgctgctgctgctgctgctcctggaaaccggagcccaggatgtgcgagttcaagtgctacccgaggtgcgaggccagctcgggggcaccgtggagctgccgtgccacctgctgccacctgttcctggactgtacatctccctggtgacctggcagcgcccagatgcacctgcgaaccaccagaatgtggccgccttccaccctaagatgggtcccagcttccccagcccgaagcctggcagcgagcggctgtccttcgtctctgccaagcagagcactgggcaagacacagaggcagagctccaggacgccacgctggccctccacgggctcacggtggaggacgagggcaactacacttgcgagtttgccaccttccccaaggggtccgtccgagggatgacctggctcagagtcatagccaagcccaagaaccaagctgaggcccagaaggtcacgttcagccaggaccctacgacagtggccctctgcatctccaaagagggccgcccacctgcccggatctcctggctctcatccctggactgggaagccaaagagactcaggtgtcagggaccctggccggaactgtcactgtcaccagccgcttcaccttggtgccctcgggccgagcagatggtgtcacggtcacctgcaaagtggagcatgagagcttcgaggaaccagccctgatacctgtgaccctctctgtacgctaccctcctgaagtgtccatctccggctatgatgacaactggtacctcggccgtactgatgccaccctgagctgtgacgtccgcagcaacccagagcccacgggctatgactggagcacgacctcaggcaccttcccgacctccgcagtggcccagggctcccagctggtcatccacgcagtggacagtctgttcaataccaccttcgtctgcacagtcaccaatgccgtgggcatgggccgcgctgagcaggtcatctttgtccgagagacccccaacacagcaggcgcaggggccacaggcggcatcatcgggggcatcatcgccgccatcattgctactgctgtggctgccacgggcatccttatctgccggcagcagcggaaggagcagacgctgcagggggcagaggaggacgaagacctggagggacctccctcctacaagccaccgaccccaaaagcgaagctggaggcacaggagatgccctcccagctcttcactctgggggcctcggagcacagcccactcaagaccccctactttgatgctggcgcctcatgcactgagcaggaaatgcctcgataccatgagctgcccaccttggaagaacggtcaggacccttgcaccctggagccacaagcctggggtcccccatcccggtgcctccagggccacctgctgtggaagacgtttccctggatctagaggatgaggagggggaggaggaggaagagtatctggacaagatcaaccccatctatgatgctctgtcctatagcagcccctctgattcctaccagggcaaaggctttgtcatgtcccgggccatgtatgtg

SEQ ID NO: 71 - DNA, 1008 bp, Homo sapiens
  CD226 antigen
atggattatcctactttacttttggctcttcttcatgtatacagagctctatgtgaagaggtgctttggcatacatcagttccctttgccgagaacatgtctctagaatgtgtgtatccatcaatgggcatcttaacacaggtggagtggttcaagatcgggacccagcaggattccatagccattttcagccctactcatggcatggtcataaggaagccctatgctgagagggtttactttttgaattcaacgatggcttccaataacatgactcttttctttcggaatgcctctgaagatgatgttggctactattcctgctctctttacacttacccacagggaacttggcagaaggtgatacaggtggttcagtcagatagttttgaggcagctgtgccatcaaatagccacattgtttcggaacctggaaagaatgtcacactcacttgtcagcctcagatgacgtggcctgtgcaggcagtgaggtgggaaaagatccagccccgtcagatcgacctcttaacttactgcaacttggtccatggcagaaatttcacctccaagttcccaagacaaatagtgagcaactgcagccacggaaggtggagcgtcatcgtcatccccgatgtcacagtctcagactcggggctttaccgctgctacttgcaggccagcgcaggagaaaacgaaaccttcgtgatgagattgactgtagccgagggtaaaaccgataaccaatataccctctttgtggctggagggacagttttattgttgttgtttgttatctcaattaccaccatcattgtcattttccttaacagaaggagaaggagagagagaagagatctatttacagagtcctgggatacacagaaggcacccaataactatagaagtcccatctctaccagtcaacctaccaatcaatccatggatgatacaagagaggatatttatgtcaactatccaaccttctctcgcagaccaaagactagagtt

SEQ ID NO: 72 - DNA, 545 bp, Homo sapiens
  CD160 antigen
ggatgctgttggaacccggcagaggctgctgtgccctggccatcctgctggcaattgtggacatccagtctggtggatgcattaacatcaccagctcagcttcccaggaaggaacgcgactaaacttaatctgtactgtatggcataagaaagaagaggctgaggggtttgtagtgtttttgtgcaaggacaggtctggagactgttctcctgagaccagtttaaaacagctgagacttaaaagggatcctgggatagatggtgttggtgaaatatcatctcagttgatgttcaccataagccaagtcacaccgttgcacagtgggacctaccagtgttgtgccagaagccagaagtcaggtatccgccttcagggccattttttctccattctattcacagagacagggaactacacagtgacgggattgaaacaaagacaacaccttgagttcagccataatgaaggcactctcagttcaggcttcctacaagaaaaggtctgggtaatgctggtcaccagccttgtggcccttcaagctttg

SEQ ID NO: 73 - DNA, 264 bp, Homo sapiens
  human U6 RNA Pol III promoter
aaggtcgggcaggaagagggcctatttcccatgattccttcatatttgcatatacgatacaaggctgttagagagataattagaattaatttgactgtaaacacaaagatattagtacaaaatacgtgacgtagaaagtaataatttcttgggtagtttgcagttttaaaattatgttttaaaatggactatcatatgcttaccgtaacttgaaagtatttcgatttcttggctttatatatcttgtggaaaggacgaaactag

SEQ ID NO: 74 - DNA, 99 bp, Homo sapiens
  human H1 RNA Pol III promoter
atatttgcatgtcgctatgtgttctgggaaatcaccataaacgtgaaatgtctttggatttgggaatcttataagttctgtatgagaccactccctagg

SEQ ID NO: 75 - DNA, 58 bp, Artificial Sequence
  shRNA-encoding sequence targeting muPD-L1
ccggccgaaatgatacacaattcgactcgagtcgaattgtgtatcatttcggtttttg

SEQ ID NO: 76 - DNA, 57 bp, Artificial Sequence
  shRNA-encoding sequence targeting muSIRPA
ccggccacaactggaatgtcttcatctcgagatgaagacattccagttgtggttttt

SEQ ID NO: 77 - DNA, 58 bp, Artificial Sequence
  shRNA-encoding sequence targeting muTREX1, clone 1
ccggacaaccaacctaaggccacatctcgagatgtggccttaggttggttgttttttg

SEQ ID NO: 78 - DNA, 58 bp, Artificial Sequence
  shRNA-encoding sequence targeting muTREX1, clone 2
ccggcctagatggtaccttctgtgtctcgagacacagaaggtaccatctaggtttttg

SEQ ID NO: 79 - DNA, 3966 bp, Artificial Sequence
  Vector1-human shTREX1-1_shPDL1-1
ctttcctgcgttatcccctgattctgtggataaccgtattaccgcctttgagtgagctgataccgctcgccgcagccgaacgaccgagcgcagcgagtcagtgagcgaggaagcggaagagcgcccaatacgcaaaccgcctctccccgcgcgttggccgattcattaatgcagctggcacgacaggtttcccgactggaaagcgggcagtgagcgcaacgcaattaatacgcgtaccgctagccaggaagagtttgtagaaacgcaaaaaggccatccgtcaggatggccttctgcttagtttgatgcctggcagtttatggcgggcgtcctgcccgccaccctccgggccgttgcttcacaacgttcaaatccgctcccggcggatttgtcctactcaggagagcgttcaccgacaaacaacagataaaacgaaaggcccagtcttccgactgagcctttcgttttatttgatgcctggcagttccctactctcgcgttaacgctagcatggatgttttcccagtcacgacgttgtaaaacgacggccagtcttaagctcgggcccttaaaggaaccaattcagtcgagaattggtaccatatttgcatgtcgctatgtgttctgggaaatcaccataaacgtgaaatgtctttggatttgggaatcttataagttctgtatgagaccactccctaggcagcgcatgggcgtcaattctagagattgacgcccatgcgctgcttttttcgacagatctggcgcgccatagtggccagcggccgcaggtaagccagcccaggcctcgccctccagctcaaggcgggacaggtgccctagagtagcctgcatccagggacaggccccagccgggtgctgacacgtccacctccatctcttcctcaggtctgcccgggtggcatccctgtgacccctccccagtgcctctcctggccctggaagttgccactccagtgcccaccagccttgtcctaataaaattaagttgcatcattttgtctgactaggtgtccttctataatattatggggtggaggggggtggtatggagcaaggggcccaagttaacttgtttattgcagcttataatggttacaaataaagcaatagcatcacaaatttcacaaataaagcatttttttcactgcattctagttgtggtttgtccaaactcatcaatgtatcttatcatgtctggatccaaggtcgggcaggaagagggcctatttcccatgattccttcatatttgcatatacgatacaaggctgttagagagataattagaattaatttgactgtaaacacaaagatattagtacaaaatacgtgacgtagaaagtaataatttcttgggtagtttgcagttttaaaattatgttttaaaatggactatcatatgcttaccgtaacttgaaagtatttcgatttcttggctttatatatcttgtggaaaggacgaaactaggtagagtatggtagcaatatctagagtattgctaccatactctacttttttcgagtagctagagaattcatggtaatagcgatgactaatacgtagatgtactgccaagtaggaaagtcccataaggtcatgtactgggcataatgccaggcgggccatttaccgtcattgacgtcaatagggggcgtacttggcatatgatacacttgatgtactgccaagtgggcagtttaccgtaaatagtccacccattgacgtcaatggaaagtccctattggcgttactatgggaacatacgtcattattgacgtcaatgggcgggggtcgttgggcggtcagccaggcgggccatttaccgtaagttatgtaacgcggaactccatatatgggctatgaactaatgaccccgtaattgattactattaataactagccatccagctgatatcccatggtcatagctgtttcctggcagctctggcccgtgtctcaaaatctctgatgttacattgcacaagataaaaatatatcatcatgaacaataaaactgtctgcttacataaacagtaatacaaggggtgttatgaaaaatgttggttttatcggctggcgcggaatggtcggctctgttctcatgcaacgcatggtagaggagcgcgatttcgacgctattcgccctgttttcttttctacctcccagtttggacaggcggcgcccaccttcggcgacacctccaccggcacgctacaggacgcttttgatctggatgcgctaaaagcgctcgatatcatcgtgacctgccagggcggcgattataccaacgaaatttatccaaagctgcgcgaaagcggatggcagggttactggattgatgcggcttctacgctgcgcatgaaagatgatgccattattattctcgacccggtcaaccaggacgtgattaccgacggcctgaacaatggcgtgaagacctttgtgggcggtaactgtaccgttagcctgatgttgatgtcgctgggcggtctctttgcccataatctcgttgactgggtatccgtcgcgacctatcaggccgcctccggcggcggcgcgcgccatatgcgcgagctgttaacccagatgggtcagttgtatggccatgtcgccgatgaactggcgacgccgtcttccgcaattcttgatattgaacgcaaagttacggcattgacccgcagcggcgagctgccggttgataactttggcgtaccgctggcgggaagcctgatcccctggatcgacaaacagctcgataacggccagagccgcgaagagtggaaaggccaggcggaaaccaacaagattctcaatactgcctctgtgattccggttgatggtttgtgtgtgcgcgtcggcgcgctgcgctgtcacagccaggcgttcaccatcaagctgaaaaaagaggtatccattccgacggtggaagaactgctggcggcacataatccgtgggcgaaagtggtgccgaacgatcgtgatatcactatgcgcgaattaaccccggcggcggtgaccggcacgttgactacgccggttggtcgtctgcgtaagctgaacatggggccagagttcttgtcggcgtttaccgtaggcgaccagttgttatggggcgccgccgagccgctgcgtcgaatgctgcgccagttggcgtagtcagaattggttaattggttgtaacactggcagagcattacgctgacttgacgggacggcgcaagctcatgaccaaaatcccttaacgtgagttacgcgtcgttccactgagcgtcagaccccgtagaaaagatcaaaggatcttcttgagatcctttttttctgcgcgtaatctgctgcttgcaaacaaaaaaaccaccgctaccagcggtggtttgtttgccggatcaagagctaccaactctttttccgaaggtaactggcttcagcagagcgcagataccaaatactgtccttctagtgtagccgtagttaggccaccacttcaagaactctgtagcaccgcctacatacctcgctctgctaatcctgttaccagtggctgctgccagtggcgataagtcgtgtcttaccgggttggactcaagacgatagttaccggataaggcgcagcggtcgggctgaacggggggttcgtgcacacagcccagcttggagcgaacgacctacaccgaactgagatacctacagcgtgagcattgagaaagcgccacgcttcccgaagggagaaaggcggacaggtatccggtaagcggcagggtcggaacaggagagcgcacgagggagcttccagggggaaacgcctggtatctttatagtcctgtcgggtttcgccacctctgacttgagcgtcgatttttgtgatgctcgtcaggggggcggagcctatggaaaaacgccagcaacgcggcctttttacggttcctggccttttgctggccttttgct

SEQ ID NO: 80 - DNA, 3972 bp, Artificial Sequence
  Vector2-mouse shTREX1-1_shPDL1-1
ctttcctgcgttatcccctgattctgtggataaccgtattaccgcctttgagtgagctgataccgctcgccgcagccgaacgaccgagcgcagcgagtcagtgagcgaggaagcggaagagcgcccaatacgcaaaccgcctctccccgcgcgttggccgattcattaatgcagctggcacgacaggtttcccgactggaaagcgggcagtgagcgcaacgcaattaatacgcgtaccgctagccaggaagagtttgtagaaacgcaaaaaggccatccgtcaggatggccttctgcttagtttgatgcctggcagtttatggcgggcgtcctgcccgccaccctccgggccgttgcttcacaacgttcaaatccgctcccggcggatttgtcctactcaggagagcgttcaccgacaaacaacagataaaacgaaaggcccagtcttccgactgagcctttcgttttatttgatgcctggcagttccctactctcgcgttaacgctagcatggatgttttcccagtcacgacgttgtaaaacgacggccagtcttaagctcgggcccttaaaggaaccaattcagtcgagaattggtaccatatttgcatgtcgctatgtgttctgggaaatcaccataaacgtgaaatgtctttggatttgggaatcttataagttctgtatgagaccactccctagacaaccaacctaaggccacatctcgagatgtggccttaggttggttgtttttttcgacagatctggcgcgccatagtggccagcggccgcaggtaagccagcccaggcctcgccctccagctcaaggcgggacaggtgccctagagtagcctgcatccagggacaggccccagccgggtgctgacacgtccacctccatctcttcctcaggtctgcccgggtggcatccctgtgacccctccccagtgcctctcctggccctggaagttgccactccagtgcccaccagccttgtcctaataaaattaagttgcatcattttgtctgactaggtgtccttctataatattatggggtggaggggggtggtatggagcaaggggcccaagttaacttgtttattgcagcttataatggttacaaataaagcaatagcatcacaaatttcacaaataaagcatttttttcactgcattctagttgtggtttgtccaaactcatcaatgtatcttatcatgtctggatccaaggtcgggcaggaagagggcctatttcccatgattccttcatatttgcatatacgatacaaggctgttagagagataattagaattaatttgactgtaaacacaaagatattagtacaaaatacgtgacgtagaaagtaataatttcttgggtagtttgcagttttaaaattatgttttaaaatggactatcatatgcttaccgtaacttgaaagtatttcgatttcttggctttatatatcttgtggaaaggacgaaactagccgaaatgatacacaattcgactcgagtcgaattgtgtatcatttcggttttttcgagtagctagagaattcatggtaatagcgatgactaatacgtagatgtactgccaagtaggaaagtcccataaggtcatgtactgggcataatgccaggcgggccatttaccgtcattgacgtcaatagggggcgtacttggcatatgatacacttgatgtactgccaagtgggcagtttaccgtaaatagtccacccattgacgtcaatggaaagtccctattggcgttactatgggaacatacgtcattattgacgtcaatgggcgggggtcgttgggcggtcagccaggcgggccatttaccgtaagttatgtaacgcggaactccatatatgggctatgaactaatgaccccgtaattgattactattaataactagccatccagctgatatcccatggtcatagctgtttcctggcagctctggcccgtgtctcaaaatctctgatgttacattgcacaagataaaaatatatcatcatgaacaataaaactgtctgcttacataaacagtaatacaaggggtgttatgaaaaatgttggttttatcggctggcgcggaatggtcggctctgttctcatgcaacgcatggtagaggagcgcgatttcgacgctattcgccctgttttcttttctacctcccagtttggacaggcggcgcccaccttcggcgacacctccaccggcacgctacaggacgcttttgatctggatgcgctaaaagcgctcgatatcatcgtgacctgccagggcggcgattataccaacgaaatttatccaaagctgcgcgaaagcggatggcagggttactggattgatgcggcttctacgctgcgcatgaaagatgatgccattattattctcgacccggtcaaccaggacgtgattaccgacggcctgaacaatggcgtgaagacctttgtgggcggtaactgtaccgttagcctgatgttgatgtcgctgggcggtctctttgcccataatctcgttgactgggtatccgtcgcgacctatcaggccgcctccggcggcggcgcgcgccatatgcgcgagctgttaacccagatgggtcagttgtatggccatgtcgccgatgaactggcgacgccgtcttccgcaattcttgatattgaacgcaaagttacggcattgacccgcagcggcgagctgccggttgataactttggcgtaccgctggcgggaagcctgatcccctggatcgacaaacagctcgataacggccagagccgcgaagagtggaaaggccaggcggaaaccaacaagattctcaatactgcctctgtgattccggttgatggtttgtgtgtgcgcgtcggcgcgctgcgctgtcacagccaggcgttcaccatcaagctgaaaaaagaggtatccattccgacggtggaagaactgctggcggcacataatccgtgggcgaaagtggtgccgaacgatcgtgatatcactatgcgcgaattaaccccggcggcggtgaccggcacgttgactacgccggttggtcgtctgcgtaagctgaacatggggccagagttcttgtcggcgtttaccgtaggcgaccagttgttatggggcgccgccgagccgctgcgtcgaatgctgcgccagttggcgtagtcagaattggttaattggttgtaacactggcagagcattacgctgacttgacgggacggcgcaagctcatgaccaaaatcccttaacgtgagttacgcgtcgttccactgagcgtcagaccccgtagaaaagatcaaaggatcttcttgagatcctttttttctgcgcgtaatctgctgcttgcaaacaaaaaaaccaccgctaccagcggtggtttgtttgccggatcaagagctaccaactctttttccgaaggtaactggcttcagcagagcgcagataccaaatactgtccttctagtgtagccgtagttaggccaccacttcaagaactctgtagcaccgcctacatacctcgctctgctaatcctgttaccagtggctgctgccagtggcgataagtcgtgtcttaccgggttggactcaagacgatagttaccggataaggcgcagcggtcgggctgaacggggggttcgtgcacacagcccagcttggagcgaacgacctacaccgaactgagatacctacagcgtgagcattgagaaagcgccacgcttcccgaagggagaaaggcggacaggtatccggtaagcggcagggtcggaacaggagagcgcacgagggagcttccagggggaaacgcctggtatctttatagtcctgtcgggtttcgccacctctgacttgagcgtcgatttttgtgatgctcgtcaggggggcggagcctatggaaaaacgccagcaacgcggcctttttacggttcctggccttttgctggccttttgct

SEQ ID NO: 81 - DNA, 1281 bp, Salmonella typhimurium
  aroA
atggaatccctgacgttacaacccatcgcgcgggtcgatggcgccattaatttacctggctccaaaagtgtttcaaaccgtgctttgctcctggcggctttagcttgtggtaaaaccgctctgacgaatctgctggatagcgatgacgtccgccatatgctcaatgccctgagcgcgttggggatcaattacaccctttctgccgatcgcacccgctgtgatatcacgggtaatggcggcgcattacgtgcgccaggcgctctggaactgtttctcggtaatgccggaaccgcgatgcgtccgttagcggcagcgctatgtctggggcaaaatgagatagtgttaaccggcgaaccgcgtatgaaagagcgtccgataggccatctggtcgattcgctgcgtcagggcggggcgaatattgattacctggagcaggaaaactatccgcccctgcgtctgcgcggcggttttaccggcggcgacattgaggttgatggtagcgtttccagccagttcctgaccgctctgctgatgacggcgccgctggcccctaaagacacaattattcgcgttaaaggcgaactggtatcaaaaccttacatcgatatcacgctaaatttaatgaaaacctttggcgtggagatagcgaaccaccactaccaacaatttgtcgtgaagggaggtcaacagtatcactctccaggtcgctatctggtcgagggcgatgcctcgtcagcgtcctattttctcgccgctggggcgataaaaggcggcacggtaaaagtgaccggaattggccgcaaaagtatgcagggcgatattcgttttgccgatgtgctggagaaaatgggcgcgaccattacctggggcgatgattttattgcctgcacgcgcggtgaattgcacgccatagatatggatatgaaccatattccggatgcggcgatgacgattgccaccacggcgctgtttgcgaaaggaaccacgacgttgcgcaatatttataactggcgagtgaaagaaaccgatcgcctgttcgcgatggcgaccgagctacgtaaagtgggcgctgaagtcgaagaagggcacgactatattcgtatcacgccgccggcgaagctccaacacgcggatattggcacgtacaacgaccaccgtatggcgatgtgcttctcactggtcgcactgtccgatacgccagttacgatcctggaccctaaatgtaccgcaaaaacgttccctgattatttcgaacaactggcgcgaatgagtacgcctgcc

SEQ ID NO: 82 - DNA, 1094 bp, Salmonella typhimurium
  aroC
acggagccgtgatggcaggaaacacaattggacaactctttcgcgtaaccactttcggcgaatcacacgggctggcgcttgggtgtatcgtcgatggcgtgccgcccggcatcccgttgacggaggccgatctgcaacacgatctcgacagacgccgccccggcacctcgcgctatactacccagcgccgcgaaccggaccaggtaaaaattctctccggcgtgtttgatggcgtgacgaccggcaccagcattggcctactgattgaaaacaccgatcagcgctcgcaggactacagcgcgattaaagatgtttttcgtccgggacacgcggattacacctatgagcagaaatacggcctgcgcgattaccgtggcggtggacgttcttccgcgcgtgaaaccgcgatgcgcgtagcggcaggggcgatcgccaagaaatacctggcggaaaagttcggcatcgaaatccgcggctgcctgacccagatgggcgacattccgctggagattaaagactggcgtcaggttgagcttaatccgttcttttgtcccgatgcggacaaacttgacgcgctggacgaactgatgcgcgcgctgaaaaaagagggtgactccatcggcgcgaaagtgacggtgatggcgagcggcgtgccggcagggcttggcgaaccggtatttgaccgactggatgcggacatcgcccatgcgctgatgagcattaatgcggtgaaaggcgtggagatcggcgaaggatttaacgtggtggcgctgcgcggcagccagaatcgcgatgaaatcacggcgcagggttttcagagcaaccacgctggcggcatcctcggtggcatcagtagcgggcaacacattgtggcgcatatggcgctgaaacctacctccagcattaccgtgccgggacgtacgatcaaccgggcaggtgaagaagtcgaaatgatcaccaaagggcgccacgatccgtgtgtggggattcgcgcagtgccgatcgcagaagccatgctggcgatcgtgctgatggatcacctgctgcgccatcgggcacagaatgcggatgtaaagacagagattccacgctgg

SEQ ID NO: 83 - DNA, 767 bp, Salmonella typhimurium
  aroD
aagggtaccaaatgaaaaccgtaactgtaagagatctcgtggttggcgaaggcgcgccaaagatcattgtgtcgctaatgggaaaaaccattaccgatgtgaaatcggaagcactcgcctaccgtgaagcggatttcgatattctggagtggcgcgttgaccattttgccaacgtgacaacggcggaaagcgtacttgaggccgccggcgccatccgggagattattaccgataaacccttgctatttaccttccgcagcgcgaaagaaggcggcgaacaggcgctaaccaccggacagtatatcgatctgaatcgtgcagcggttgacagcggtctggtcgatatgatcgatcttgagctttttaccggcgacgatgaggtgaaagccaccgtcggctatgctcatcaacacaatgttgcggtgatcatgtctaaccatgattttcataaaacgcccgcagcggaagagattgttcagcgtctgcgtaaaatgcaggaactgggcgctgatattccgaagatcgccgtcatgccacagactaaagccgatgtcctgaccttacttaccgccactgtagaaatgcaggagcgctatgcggatcgtccgattattaccatgtcgatgtcgaaaaccggggtaatatctcgtcttgccggcgaagtgttcggttctgcggcaacgtttggcgcggtgaaaaaagcatctgcgccgggacaaatatcggtagccgatctgcgtaccgtattaactatattgcaccaggcg

SEQ ID NO: 84 - DNA, 684 bp, Salmonella typhimurium
  PhoP
aagggagaagagatgatgcgcgtactggttgtagaggataatgcattattacgccaccacctgaaggttcagctccaggattcaggtcaccaggtcgatgccgcagaagatgccagggaagctgattactaccttaatgaacaccttccggatatcgctattgtcgatttaggtctgccggatgaagacggcctttccttaatacgccgctggcgcagcagtgatgtttcactgccggttctggtgttaaccgcgcgcgaaggctggcaggataaagtcgaggttctcagctccggggccgatgactacgtgacgaagccattccacatcgaagaggtaatggcgcgtatgcaggcgttaatgcgccgtaatagcggtctggcctcccaggtgatcaacatcccgccgttccaggtggatctctcacgccgggaattatccgtcaatgaagaggtcatcaaactcacggcgttcgaatacaccattatggaaacgcttatccgtaacaacggtaaagtggtcagcaaagattcgctgatgcttcagctgtatccggatgcggaactgcgggaaagtcataccattgatgttctcatggggcgtctgcggaaaaaaatacaggcccagtatccgcacgatgtcattaccaccgtacgcggacaaggatatctttttgaattgcgc

SEQ ID NO: 85 - DNA, 1461 bp, Salmonella typhimurium
  PhoQ
atgaataaatttgctcgccattttctgccgctgtcgctgcgggttcgttttttgctggcgacagccggcgtcgtgctggtgctttctttggcatatggcatagtggcgctggtcggctatagcgtaagttttgataaaaccacctttcgtttgctgcgcggcgaaagcaacctgttttataccctcgccaaatgggaaaataataaaatcagcgttgagctgcctgaaaatctggacatgcaaagcccgaccatgacgctgatttacgatgaaacgggcaaattattatggacgcagcgcaacattccctggctgattaaaagcattcaaccggaatggttaaaaacgaacggcttccatgaaattgaaaccaacgtagacgccaccagcacgctgttgagcgaagaccattccgcgcaggaaaaactcaaagaagtacgtgaagatgacgatgatgccgagatgacccactcggtagcggtaaatatttatcctgccacggcgcggatgccgcagttaaccatcgtggtggtcgataccattccgatagaactaaaacgctcctatatggtgtggagctggttcgtatacgtgctggccgccaatttactgttagtcattcctttactgtggatcgccgcctggtggagcttacgccctatcgaggcgctggcgcgggaagtccgcgagcttgaagatcatcaccgcgaaatgctcaatccggagacgacgcgtgagctgaccagccttgtgcgcaaccttaatcaactgctcaaaagcgagcgtgaacgttataacaaataccgcacgaccctgaccgacctgacgcacagtttaaaaacgccgctcgcggttttgcagagtacgttacgctctttacgcaacgaaaagatgagcgtcagcaaagctgaaccggtgatgctggaacagatcagccggatttcccagcagatcggctattatctgcatcgcgccagtatgcgcggtagcggcgtgttgttaagccgcgaactgcatcccgtcgcgccgttgttagataacctgatttctgcgctaaataaagtttatcagcgtaaaggggtgaatatcagtatggatatttcaccagaaatcagttttgtcggcgagcaaaacgactttgtcgaagtgatgggcaacgtactggacaacgcttgtaaatattgtctggagtttgtcgagatttcggctcgccagaccgacgatcatttgcatattttcgtcgaagatgacggcccaggcattccccacagcaaacgttccctggtgtttgatcgcggtcagcgcgccgataccctacgaccaggacaaggcgtggggctggctgtcgcgcgcgagattacggaacaatacgccgggcagatcattgccagcgacagtctgctcggtggcgcccgtatggaggtcgtttttggccgacagcatcccacacagaaagaggaa

SEQ ID NO: 86 - DNA, 2731 bp, Salmonella typhimurium
  Adenylate cyclase (cyaA)
tctttctttacggtcaatgagcaaggtgttaaattgatcacgttttagaccattttttcgtcggtattagataaaaatatgcaggcgagaaagggtaacggttatttttgacatacggtttatcccgaatggcgacggtcaagtactgacctgcaccatgacgggtagcaacatcaggcgatacgtcttgtacctctatattgagactctgaaacagagactggatgccataaatcaactgcgtgtggatcgcgcgcttgctgccatgggacccgcttttcagcaggtttacagtcttctgccgacattattgcactatcaccatccactgatgccgggttaccttgatggtaacgttcccagcggtatttgcttctacacgcctgatgaaacccaacgccactatctgaacgaacttgagctgtaccgcggtatgacgccgcaggacccgccgaagggcgagctgccgattaccggcgtttacaccatgggcagcacctcctcggtcgggcagagctgctcgtccgacctggatatctgggtgtgccatcagtcctggctcgacggcgaagagcgtcagttgctgcaacgtaagtgtagcctgctggaaagctgggccgcctcgcttggcgttgaggtgagcttcttcctgatcgacgagaaccgtttccgccataacgaaagcggcagtctgggcggggaagactgtggttctacgcagcatatcctgttgcttgatgagttttatcgtaccgctgtgcgcctggccgggaagcgtatcctgtggagtatggtgccgtgcgacgaagaagagcattacgacgactatgtcatgacgctctatgcgcagggcgtattaacgccaaacgaatggctggatctggggggcttaagctcgctctccgccgaagagtactttggcgccagcctgtggcagctatacaagagcattgactcgccgtacaaagcggtgctgaaaacgctgctgctggaagcctattcatgggaatatcctaacccacgtctgctggcgaaagatattaaacaacgtctgcatgacggtgaaatcgtatcgtttggactcgatccctactgcatgatgctggaacgggtcactgaatacctgacggcgattgaagatccgacgcggctggatttagtccgccgctgcttttacctgaaagtgtgcgagaaattaagtcgcgagcgtgcctgcgtaggctggcgtcgggaagtattaagccagttagtcagcgagtggggatgggacgacgcgcgtctgaccatgctcgataatcgcgcaaactggaaaatcgatcaggtgcgcgaagcccacaacgaattgctcgacgccatgatgcaaagctatcgtaatctgattcgctttgcgcggcgcaacaacctcagcgtgagtgccagcccgcaggatatcggcgtactgacgcgtaagctgtacgcggcttttgaagcgttgccgggtaaagtcacgctggtgaacccgcagatatcgccggatctgtccgagccgaatttaacctttatccatgtgccgccgggacgcgccaaccgttcaggctggtatctctacaaccgcgcgccgaacatggattccatcatcagccatcagccgctggaatataaccgttatcttaataagctggtcgcgtgggcgtggttcaacggcctgctgacgtcgcgaacgcatctgtttattaagggcaacggtattgtcgacctgcctaagttacaggagatggtcgccgatgtttcgcaccatttcccgctgcgcttgcctgctccgacgccgaaagcgctctacagcccctgtgaaattcgccatctggcgattatcgttaacctcgaatatgacccgacggcggcgtttcgcaataaagtggtccattttgacttccgtaagctggacgttttcagctttggcgaagagcaaaactgtctgataggcagtatcgacttgttatatcgcaactcgtggaacgaagtgcgtactctgcactttaacggcgagcaggcgatgatcgaagcgctgaaaacgattctggggaaaatgcaccaggatgccgcgccgccggatagcgtggaggtgttctgctacagtcagcatcttcgcggcctgattcgcacccgtgtgcagcaactggtctccgaatgtattgagctacgtctttccagcacccgtcaggagaccggtcgcttcaaggcgctgcgggtttccgggcagacgtgggggctattcttcgaacgcttgaatgtctcggtgcagaagctggagaacgctatcgaattctacggcgcgatttcgcataacaagctgcacgggctgtcggtacaggtggaaaccaaccaggtgaaattgccgtcagtggtggatggcttcgccagcgaagggattatccagttcttctttgaagaaacaggcgatgagaaaggctttaacatttatattctggatgaaagtaaccgggcggaagtatatcaccactgcgaaggtagcaaggaagaactggtgcgcgacgtcagtcgcttctattcgtcatcgcacgatcgcttcacgtatggctccagttttatcaactttaacctgccgcagttctaccagatagtgaaaaccgatggccgcgcgcaggtgatcccattccgtacgcagcctatcaacaccgtgccgccagcaaaccaggatcatgacgcgccgctattgcagcagtatttttcg

SEQ ID NO: 87 - DNA, 826 bp, Salmonella typhimurium
  cAMP-activated global transcriptional regulator (crp)
aagctatgctaaaacagacaagatgctacagtaatacattgacgtactgcatgtatgcagaggacatcacattacaggctacaatctattttcgtagcccccttcccaggtagcgggaagtatatttttgcaaccccagagacagtgccgttttctggctctggagacagcttataacagaggataaccgcgcatggtgcttggcaaaccgcaaacagacccgactcttgaatggttcttgtctcattgccacattcataagtacccgtcaaagagcacgctgattcaccagggtgaaaaagcagaaacgctgtactacatcgttaaaggctccgtggcagtgctgatcaaagatgaagaagggaaagaaatgatcctttcttatctgaatcagggtgattttattggtgaactgggcctgtttgaagaaggccaggaacgcagcgcctgggtacgtgcgaaaaccgcatgtgaggtcgctgaaatttcctacaaaaaatttcgccaattaatccaggtcaacccggatattctgatgcgcctctcttcccagatggctcgtcgcttacaagtcacctctgaaaaagtaggtaacctcgccttccttgacgtcaccgggcgtatcgctcagacgctgctgaatctggcgaaacagcccgatgccatgacgcacccggatgggatgcagatcaaaatcactcgtcaggaaatcggccagatcgtcggctgctcccgcgaaaccgttggtcgtattttgaaaatgctggaagatcaaaacctgatctccgcgcatggcaagaccatcgtcgtctacggcacccgttaa

SEQ ID NO: 88 - DNA, 1566 bp, Homo sapiens
  cyclic GMP-AMP (cGAMP) synthase (cGAS), isoform 1
atgcagccttggcacggaaaggccatgcagagagcttccgaggccggagccactgcccccaaggcttccgcacggaatgccaggggcgccccgatggatcccaccgagtctccggctgcccccgaggccgccctgcctaaggcgggaaagttcggccccgccaggaagtcgggatcccggcagaaaaagagcgccccggacacccaggagaggccgcccgtccgcgcaactggggcccgcgccaaaaaggcccctcagcgcgcccaggacacgcagccgtctgacgccaccagcgcccctggggcagaggggctggagcctcctgcggctcgggagccggctctttccagggctggttcttgccgccagaggggcgcgcgctgctccacgaagccaagacctccgcccgggccctgggacgtgcccagccccggcctgccggtctcggcccccattctcgtacggagggatgcggcgcctggggcctcgaagctccgggcggttttggagaagttgaagctcagccgcgatgatatctccacggcggcggggatggtgaaaggggttgtggaccacctgctgctcagactgaagtgcgactccgcgttcagaggcgtcgggctgctgaacaccgggagctactatgagcacgtgaagatttctgcacctaatgaatttgatgtcatgtttaaactggaagtccccagaattcaactagaagaatattccaacactcgtgcatattactttgtgaaatttaaaagaaatccgaaagaaaatcctctgagtcagtttttagaaggtgaaatattatcagcttctaagatgctgtcaaagtttaggaaaatcattaaggaagaaattaacgacattaaagatacagatgtcatcatgaagaggaaaagaggagggagccctgctgtaacacttcttattagtgaaaaaatatctgtggatataaccctggctttggaatcaaaaagtagctggcctgctagcacccaagaaggcctgcgcattcaaaactggctttcagcaaaagttaggaagcaactacgactaaagccattttaccttgtacccaagcatgcaaaggaaggaaatggtttccaagaagaaacatggcggctatccttctctcacatcgaaaaggaaattttgaacaatcatggaaaatctaaaacgtgctgtgaaaacaaagaagagaaatgttgcaggaaagattgtttaaaactaatgaaataccttttagaacagctgaaagaaaggtttaaagacaaaaaacatctggataaattctcttcttatcatgtgaaaactgccttctttcacgtatgtacccagaaccctcaagacagtcagtgggaccgcaaagacctgggcctctgctttgataactgcgtgacatactttcttcagtgcctcaggacagaaaaacttgagaattattttattcctgaattcaatctattctctagcaacttaattgacaaaagaagtaaagaatttctgacaaagcaaattgaatatgaaagaaacaatgagtttccagtttttgatgaattt

SEQ ID NO: 89 - DNA, 1137 bp, Homo sapiens
  Stimulator of Interferon Genes (STING)(H232 Allele)
atgccccactccagcctgcatccatccatcccgtgtcccaggggtcacggggcccagaaggcagccttggttctgctgagtgcctgcctggtgaccctttgggggctaggagagccaccagagcacactctccggtacctggtgctccacctagcctccctgcagctgggactgctgttaaacggggtctgcagcctggctgaggagctgcgccacatccactccaggtaccggggcagctactggaggactgtgcgggcctgcctgggctgccccctccgccgtggggccctgttgctgctgtccatctatttctactactccctcccaaatgcggtcggcccgcccttcacttggatgcttgccctcctgggcctctcgcaggcactgaacatcctcctgggcctcaagggcctggccccagctgagatctctgcagtgtgtgaaaaagggaatttcaacgtggcccatgggctggcatggtcatattacatcggatatctgcggctgatcctgccagagctccaggcccggattcgaacttacaatcagcattacaacaacctgctacggggtgcagtgagccagcggctgtatattctcctcccattggactgtggggtgcctgataacctgagtatggctgaccccaacattcgcttcctggataaactgccccagcagaccggtgaccatgctggcatcaaggatcgggtttacagcaacagcatctatgagcttctggagaacgggcagcgggcgggcacctgtgtcctggagtacgccacccccttgcagactttgtttgccatgtcacaatacagtcaagctggctttagccgggaggataggcttgagcaggccaaactcttctgccggacacttgaggacatcctggcagatgcccctgagtctcagaacaactgccgcctcattgcctaccaggaacctgcagatgacagcagcttctcgctgtcccaggaggttctccggcacctgcggcaggaggaaaaggaagaggttactgtgggcagcttgaagacctcagcggtgcccagtacctccacgatgtcccaagagcctgagctcctcatcagtggaatggaaaagcccctccctctccgcacggatttctct

SEQ ID NO: 90 - DNA, 972 bp, Salmonella typhimurium
  lipid A biosynthesis myristoyltransferase (msbB)
ttatttgatgggataaagatctttacgcttatacggctgaatctcgcctggcttgcgggttttgagcagcttcaggatccaggtgtactgttccggatgcgggccgacaaaaatttcgacctcttcgttcatccgtctggcgatagtgtggtcgtcagccgtgagcagatcgtccattggcgggcgaatctggatagtcaggcgatgcgttttaccattatacaccgggaaaagcggtatcacgcgtgcgcggcacactttcatcagccgaccaattgcaggcagcgtcgctttgtatgtcgcaaagaaatcaacgaattcactatgctccgggccgtgatcctggtccggcaggtagtaaccccagtagccctgacgaacagactgaataaagggtttaatcccgtcattacgcgcatgcaaacgtccgccgaaacgccgacgcactgtgttccagatatagtcaaaaaccggattaccctgattatgaaacatcgccgccattttttgcccctgagaggccatcagcatggctggaatgtcgacgccccagccatgcggtacgagaaaaatgactttttcgtcgttacgacgcatctcctcgataatctccagaccttcccagtcaacacgctgttgaatttttttcggaccgcgcatcgccaactcagccatcatcgccattgcctgtggcgcggtggcgaacatctcatcgacaatcgcttcgcgctcagcttcgctacgctgcggaaagcacaacgacagattaattagcgcccggcgacgagaactcttccccagccgtccggcaaaacgccccagcgtcgccagcaaagggtcgcggaatgatgccggtgttaatgcgatccccgccattgccgccgcgcccaaccaggcgccccaatactgtggatagcgaaaggatttttcgaattcagggatatactcactattattttttttggtttccat

SEQ ID NO: 91 - DNA, 1038 bp, Salmonella typhimurium
  Phosphoribosylaminoimidazole synthetase (purI)
ttattcaataaccacacgctgttcggaatcagaggctttgatgataccgattttccatgcgttttcacctttctcgtttagcagagcaagcgctttgtccgcttccggagcggagagcgcaatcaccatgccgacgccgcagttaaaggtacggtacatttcatgtcggctgacattaccggcggtttgcagccaggtaaagatggcgggccactgccaggacgactcattaattaccgcctgggtattctccggcagaacgcgcggaatattttcccaaaagcccccgccggtgaggtgggcgatagcgtgtacatcgacgttttcaatcagttccagaaccgattttacgtagatacgggtcggttcaagcagatgatcggccagcggcttcccttccagcagagtggtttgtgggtcgcagccgctaacgtcaataattttccgcaccagcgaatatccattcgagtgcgggccgctggagccgagtgcaatcagcacgtcgccttcggcaacccgggagccgtcgatgatttctgatttttcgactacgccgacgcagaaacccgccacatcgtaatcttcgccgtgatacatgcccggcatttccgccgtctcgccgccgaccagcgcgcagccggattgcaggcagccttcggcaataccgttgatcacgctggcggcggtatcgacatccagtttacccgtggcatagtaatcgaggaaaaacagcggttccgcgccctgaacgaccagatcgtttacgcacattgccaccagatcaataccgatagcgtcgtgacgctttaagtccatcgccaggcgaagtttggtacctacgccgtcagtgccggaaaccagtaccggttcacgatatttttgcggcaacgcgcacagcgcaccgaaaccgcccagaccgcccataacctccgggcggcgagttttcttcactacgcctttgattcgatcaaccagagcgttacccgcatcaatatcgacgccggcatctttatagctaagagaggtcttatcggtcac

SEQ ID NO: 92 - DNA, 426 bp, Homo sapiens
  Survivin (SVN)/BIRC5, isoform 1
atgggtgccccgacgttgccccctgcctggcagccctttctcaaggaccaccgcatctctacattcaagaactggcccttcttggagggctgcgcctgcaccccggagcggatggccgaggctggcttcatccactgccccactgagaacgagccagacttggcccagtgtttcttctgcttcaaggagctggaaggctgggagccagatgacgaccccatagaggaacataaaaagcattcgtccggttgcgctttcctttctgtcaagaagcagtttgaagaattaacccttggtgaatttttgaaactggacagagaaagagccaagaacaaaattgcaaaggaaaccaacaataagaagaaagaatttgaggaaactgcggagaaagtgcgccgtgccatcgagcagctggctgccatggat

SEQ ID NO: 93 - DNA, 285 bp, E. coli
  araBAD promoter (pBAD)
aagaaaccaattgtccatattgcatcagacattgccgtcactgcgtcttttactggctcttctcgctaaccaaaccggtaaccccgcttattaaaagcattctgtaacaaagcgggaccaaagccatgacaaaaacgcgtaacaaaagtgtctataatcacggcagaaaagtccacattgattatttgcacggcgtcacactttgctatgccatagcatttttatccataagattagcggatcttacctgacgctttttatcgcaactctctactgtttctccat

SEQ ID NO: 94 - DNA, 459 bp, Homo sapiens
  Interleukin 2 (IL-2)
atgtacaggatgcaactcctgtcttgcattgcactaagtcttgcacttgtcacaaacagtgcacctacttcaagttctacaaagaaaacacagctacaactggagcatttactgctggatttacagatgattttgaatggaattaataattacaagaatcccaaactcaccaggatgctcacatttaagttttacatgcccaagaaggccacagaactgaaacatcttcagtgtctagaagaagaactcaaacctctggaggaagtgctaaatttagctcaaagcaaaaactttcacttaagacccagggacttaatcagcaatatcaacgtaatagttctggaactaaagggatctgaaacaacattcatgtgtgaatatgctgatgagacagcaaccattgtagaatttctgaacagatggattaccttttgtcaaagcatcatctcaacactgact

SEQ ID NO: 95 - DNA, 567 bp, Homo sapiens
  Interferon (IFN) alpha
atggcctcgccctttgctttactgatggtcctggtggtgctcagctgcaagtcaagctgctctctgggctgtgatctccctgagacccacagcctggataacaggaggaccttgatgctcctggcacaaatgagcagaatctctccttcctcctgtctgatggacagacatgactttggatttccccaggaggagtttgatggcaaccagttccagaaggctccagccatctctgtcctccatgagctgatccagcagatcttcaacctctttaccacaaaagattcatctgctgcttgggatgaggacctcctagacaaattctgcaccgaactctaccagcagctgaatgacttggaagcctgtgtgatgcaggaggagagggtgggagaaactcccctgatgaatgcggactccatcttggctgtgaagaaatacttccgaagaatcactctctatctgacagagaagaaatacagcccttgtgcctgggaggttgtcagagcagaaatcatgagatccctctctttatcaacaaacttgcaagaaagattaaggaggaaggaa

SEQ ID NO: 96 - DNA, 729 bp, Homo sapiens
  CD48, isoform 1
atgtgctccagaggttgggattcgtgtctggctctggaattgctactgctgcctctgtcactcctggtgaccagcattcaaggtcacttggtacatatgaccgtggtctccggcagcaacgtgactctgaacatctctgagagcctgcctgagaactacaaacaactaacctggttttatactttcgaccagaagattgtagaatgggattccagaaaatctaagtactttgaatccaaatttaaaggcagggtcagacttgatcctcagagtggcgcactgtacatctctaaggtccagaaagaggacaacagcacctacatcatgagggtgttgaaaaagactgggaatgagcaagaatggaagatcaagctgcaagtgcttgaccctgtacccaagcctgtcatcaaaattgagaagatagaagacatggatgacaactgttatctgaaactgtcatgtgtgatacctggcgagtctgtaaactacacctggtatggggacaaaaggcccttcccaaaggagctccagaacagtgtgcttgaaaccacccttatgccacataattactccaggtgttatacttgccaagtcagcaattctgtgagcagcaagaatggcacggtctgcctcagtccaccctgtaccctggcccggtcctttggagtagaatggattgcaagttggctagtggtcacggtgcccaccattcttggcctgttacttacc

SEQ ID NO: 97 - DNA, 1602 bp, Homo sapiens
  CD276/B7-H3, isoform 1
atgctgcgtcggcggggcagccctggcatgggtgtgcatgtgggtgcagccctgggagcactgtggttctgcctcacaggagccctggaggtccaggtccctgaagacccagtggtggcactggtgggcaccgatgccaccctgtgctgctccttctcccctgagcctggcttcagcctggcacagctcaacctcatctggcagctgacagataccaaacagctggtgcacagctttgctgagggccaggaccagggcagcgcctatgccaaccgcacggccctcttcccggacctgctggcacagggcaacgcatccctgaggctgcagcgcgtgcgtgtggcggacgagggcagcttcacctgcttcgtgagcatccgggatttcggcagcgctgccgtcagcctgcaggtggccgctccctactcgaagcccagcatgaccctggagcccaacaaggacctgcggccaggggacacggtgaccatcacgtgctccagctaccagggctaccctgaggctgaggtgttctggcaggatgggcagggtgtgcccctgactggcaacgtgaccacgtcgcagatggccaacgagcagggcttgtttgatgtgcacagcatcctgcgggtggtgctgggtgcaaatggcacctacagctgcctggtgcgcaaccccgtgctgcagcaggatgcgcacagctctgtcaccatcacaccccagagaagccccacaggagccgtggaggtccaggtccctgaggacccggtggtggccctagtgggcaccgatgccaccctgcgctgctccttctcccccgagcctggcttcagcctggcacagctcaacctcatctggcagctgacagacaccaaacagctggtgcacagtttcaccgaaggccgggaccagggcagcgcctatgccaaccgcacggccctcttcccggacctgctggcacaaggcaatgcatccctgaggctgcagcgcgtgcgtgtggcggacgagggcagcttcacctgcttcgtgagcatccgggatttcggcagcgctgccgtcagcctgcaggtggccgctccctactcgaagcccagcatgaccctggagcccaacaaggacctgcggccaggggacacggtgaccatcacgtgctccagctaccggggctaccctgaggctgaggtgttctggcaggatgggcagggtgtgcccctgactggcaacgtgaccacgtcgcagatggccaacgagcagggcttgtttgatgtgcacagcgtcctgcgggtggtgctgggtgcgaatggcacctacagctgcctggtgcgcaaccccgtgctgcagcaggatgcgcacggctctgtcaccatcacagggcagcctatgacattccccccagaggccctgtgggtgaccgtggggctgtctgtctgtctcattgcactgctggtggccctggctttcgtgtgctggagaaagatcaaacagagctgtgaggaggagaatgcaggagctgaggaccaggatggggagggagaaggctccaagacagccctgcagcctctgaaacactctgacagcaaagaagatgatggacaagaaatagcc

SEQ ID NO: 98 - DNA, 846 bp, Homo sapiens
  B7-H4/VTCN1
atggcttccctggggcagatcctcttctggagcataattagcatcatcattattctggctggagcaattgcactcatcattggctttggtatttcagggagacactccatcacagtcactactgtcgcctcagctgggaacattggggaggatggaatcctgagctgcacttttgaacctgacatcaaactttctgatatcgtgatacaatggctgaaggaaggtgttttaggcttggtccatgagttcaaagaaggcaaagatgagctgtcggagcaggatgaaatgttcagaggccggacagcagtgtttgctgatcaagtgatagttggcaatgcctctttgcggctgaaaaacgtgcaactcacagatgctggcacctacaaatgttatatcatcacttctaaaggcaaggggaatgctaaccttgagtataaaactggagccttcagcatgccggaagtgaatgtggactataatgccagctcagagaccttgcggtgtgaggctccccgatggttcccccagcccacagtggtctgggcatcccaagttgaccagggagccaacttctcggaagtctccaataccagctttgagctgaactctgagaatgtgaccatgaaggttgtgtctgtgctctacaatgttacgatcaacaacacatactcctgtatgattgaaaatgacattgccaaagcaacaggggatatcaaagtgacagaatcggagatcaaaaggcggagtcacctacagctgctaaactcaaaggcttctctgtgtgtctcttctttctttgccatcagctgggcacttctgcctctcagcccttacctgatgctaaaa

SEQ ID NO: 99 - DNA, 867 bp, Homo sapiens
  BTLA/CD272, isoform 1
atgaagacattgcctgccatgcttggaactgggaaattattttgggtcttcttcttaatcccatatctggacatctggaacatccatgggaaagaatcatgtgatgtacagctttatataaagagacaatctgaacactccatcttagcaggagatccctttgaactagaatgccctgtgaaatactgtgctaacaggcctcatgtgacttggtgcaagctcaatggaacaacatgtgtaaaacttgaagatagacaaacaagttggaaggaagagaagaacatttcatttttcattctacattttgaaccagtgcttcctaatgacaatgggtcataccgctgttctgcaaattttcagtctaatctcattgaaagccactcaacaactctttatgtgacagatgtaaaaagtgcctcagaacgaccctccaaggacgaaatggcaagcagaccctggctcctgtatagtttacttcctttggggggattgcctctactcatcactacctgtttctgcctgttctgctgcctgagaaggcaccaaggaaagcaaaatgaactctctgacacagcaggaagggaaattaacctggttgatgctcaccttaagagtgagcaaacagaagcaagcaccaggcaaaattcccaagtactgctatcagaaactggaatttatgataatgaccctgacctttgtttcaggatgcaggaagggtctgaagtttattctaatccatgcctggaagaaaacaaaccaggcattgtttatgcttccctgaaccattctgtcattggaccgaactcaagactggcaagaaatgtaaaagaagcaccaacagaatatgcatccatatgtgtgaggagt

SEQ ID NO: 100 - DNA, 276 bp, Homo sapiens
  Chemokine (C-C motif) ligand 4 (CCL4)
atgaagctctgcgtgactgtcctgtctctcctcatgctagtagctgccttctgctctccagcgctctcagcaccaatgggctcagaccctcccaccgcctgctgcttttcttacaccgcgaggaagcttcctcgcaactttgtggtagattactatgagaccagcagcctctgctcccagccagctgtggtattccaaaccaaaagaagcaagcaagtctgtgctgatcccagtgaatcctgggtccaggagtacgtgtatgacctggaactgaac

SEQ ID NO: 101 - DNA, 3537 bp, Homo sapiens
  CD103/ITGAE
atgtggctcttccacactctgctctgcatagccagcctggccctgctggccgctttcaatgtggatgtggcccggccctggctcacgcccaagggaggtgcccctttcgtgctcagctcccttctgcaccaagaccccagcaccaaccagacctggctcctggtcaccagccccagaaccaagaggacaccagggcccctccatcgatgttcccttgtccaggatgaaatcctttgccatcctgtagagcatgtccccatccccaaggggaggcaccggggagtgaccgttgtccggagccaccacggtgttttgatatgcattcaagtgctggtccggcggcctcacagcctcagctcagaactcacaggcacctgtagcctcctgggccctgacctccgtccccaggctcaggccaacttcttcgaccttgaaaatctcctggatccagatgcacgtgtggacactggagactgctacagcaacaaagaaggcggtggagaagacgatgtgaacacagccaggcagcgccgggctctggagaaggaggaggaggaagacaaggaggaggaggaagacgaggaggaggaggaagctggcaccgagattgccatcatcctggatggctcaggaagcattgatcccccagactttcagagagccaaagacttcatctccaacatgatgaggaacttctatgaaaagtgttttgagtgcaactttgccttggtgcagtatggaggagtgatccagactgagtttgaccttcgggacagccaggatgtgatggcctccctcgccagagtccagaacatcactcaagtggggagtgtcaccaagactgcctcagccatgcaacacgtcttagacagcatcttcacctcaagccacggctccaggagaaaggcatccaaggtcatggtggtgctcaccgatggtggcatattcgaggaccccctcaaccttacgacagtcatcaactcccccaaaatgcagggtgttgagcgctttgccattggggtgggagaagaatttaagagtgctaggactgcgagggaactgaacctgatcgcctcagacccggatgagacccatgctttcaaggtgaccaactacatggcgctggatgggctgctgagcaaactgcggtacaacatcatcagcatggaaggcacggttggagacgcccttcactaccagctggcacagattggcttcagtgctcagatcctggatgagcggcaggtgctgctcggcgccgtcggggcctttgactggtccggaggggcgttgctctacgacacacgcagccgccggggccgcttcctgaaccagacagcggcggcggcggcagacgcggaggctgcgcagtacagctacctgggttacgctgtggccgtgctgcacaagacctgcagcctctcctacatcgcgggggctccacggtacaaacatcatggggccgtgtttgagctccagaaggagggcagagaggccagcttcctgccagtgctggagggagagcagatggggtcctattttggctctgagctgtgccctgtggacattgacatggatggaagcacggacttcttgctggtggctgctccattttaccacgttcatggagaagaaggcagagtctacgtgtaccgtctcagcgagcaggatggttctttctccttggcacgcatactgagtgggcaccccgggttcaccaatgcccgctttggctttgccatggcggctatgggggatctcagtcaggataagctcacagatgtggccatcggggcccccctggaaggttttggggcagatgatggtgccagcttcggcagtgtgtatatctacaatggacactgggacggcctctccgccagcccctcgcagcggatcagagcctccacggtggccccaggactccagtacttcggcatgtccatggctggtggctttgatattagtggcgacggccttgccgacatcaccgtgggcactctgggccaggcggttgtgttccgctcccggcctgtggttcgcctgaaggtctccatggccttcacccccagcgcactgcccatcggcttcaacggcgtcgtgaatgtccgtttatgttttgaaatcagctctgtaaccacagcctctgagtcaggcctccgcgaggcacttctcaacttcacgctggatgtggatgtggggaagcagaggagacggctgcagtgttcagacgtaagaagctgtctgggctgcctgagggagtggagcagcggatcccagctttgtgaggacctcctgctcatgcccacagagggagagctctgtgaggaggactgcttctccaatgccagtgtcaaagtcagctaccagctccagacccctgagggacagacggaccatccccagcccatcctggaccgctacactgagccctttgccatcttccagctgccctatgagaaggcctgcaagaataagctgttttgtgtcgcagaattacagttggccaccaccgtctctcagcaggagttggtggtgggtctcacaaaggagctgaccctgaacattaacctaactaactccggggaagattcctacatgacaagcatggccttgaattaccccagaaacctgcagttgaagaggatgcaaaagcctccctctccaaacattcagtgtgatgaccctcagccggttgcttctgtcctgatcatgaactgcaggattggtcaccccgtcctcaagaggtcatctgctcatgtttcagtcgtttggcagctagaggagaatgcctttccaaacaggacagcagacatcactgtgactgtcaccaattccaatgaaagacggtctttggccaacgagacccacacccttcaattcaggcatggcttcgttgcagttctgtccaaaccatccataatgtacgtgaacacaggccaggggctttctcaccacaaagaattcctcttccatgtacatggggagaacctctttggagcagaataccagttgcaaatttgcgtcccaaccaaattacgaggtctccaggttgtagcagtgaagaagctgacgaggactcaggcctccacggtgtgcacctggagtcaggagcgcgcttgtgcgtacagttcggttcagcatgtggaagaatggcattcagtgagctgtgtcatcgcttcagataaagaaaatgtcaccgtggctgcagagatctcctgggatcactctgaggagttactaaaagatgtaactgaactgcagatccttggtgaaatatctttcaacaaatctctatatgagggactgaatgcagagaaccacagaactaagatcactgtcgtcttcctgaaagatgagaagtaccattctttgcctatcatcattaaaggcagcgttggtggacttctggtgttgatcgtgattctggtcatcctgttcaagtgtggcttttttaaaagaaaatatcaacaactgaacttggagagcatcaggaaggcccagctgaaatcagagaatctgctcgaagaagagaat

SEQ ID NO: 102 - DNA, 1671 bp, Homo sapiens
  CD19, isoform 1
atgccacctcctcgcctcctcttcttcctcctcttcctcacccccatggaagtcaggcccgaggaacctctagtggtgaaggtggaagagggagataacgctgtgctgcagtgcctcaaggggacctcagatggccccactcagcagctgacctggtctcgggagtccccgcttaaacccttcttaaaactcagcctggggctgccaggcctgggaatccacatgaggcccctggccatctggcttttcatcttcaacgtctctcaacagatggggggcttctacctgtgccagccggggcccccctctgagaaggcctggcagcctggctggacagtcaatgtggagggcagcggggagctgttccggtggaatgtttcggacctaggtggcctgggctgtggcctgaagaacaggtcctcagagggccccagctccccttccgggaagctcatgagccccaagctgtatgtgtgggccaaagaccgccctgagatctgggagggagagcctccgtgtctcccaccgagggacagcctgaaccagagcctcagccaggacctcaccatggcccctggctccacactctggctgtcctgtggggtaccccctgactctgtgtccaggggccccctctcctggacccatgtgcaccccaaggggcctaagtcattgctgagcctagagctgaaggacgatcgcccggccagagatatgtgggtaatggagacgggtctgttgttgccccgggccacagctcaagacgctggaaagtattattgtcaccgtggcaacctgaccatgtcattccacctggagatcactgctcggccagtactatggcactggctgctgaggactggtggctggaaggtctcagctgtgactttggcttatctgatcttctgcctgtgttcccttgtgggcattcttcatcttcaaagagccctggtcctgaggaggaaaagaaagcgaatgactgaccccaccaggagattcttcaaagtgacgcctcccccaggaagcgggccccagaaccagtacgggaacgtgctgtctctccccacacccacctcaggcctcggacgcgcccagcgttgggccgcaggcctggggggcactgccccgtcttatggaaacccgagcagcgacgtccaggcggatggagccttggggtcccggagcccgccgggagtgggcccagaagaagaggaaggggagggctatgaggaacctgacagtgaggaggactccgagttctatgagaacgactccaaccttgggcaggaccagctctcccaggatggcagcggctacgagaaccctgaggatgagcccctgggtcctgaggatgaagactccttctccaacgctgagtcttatgagaacgaggatgaagagctgacccagccggtcgccaggacaatggacttcctgagccctcatgggtcagcctgggaccccagccgggaagcaacctccctggcagggtcccagtcctatgaggatatgagaggaatcctgtatgcagccccccagctccgctccattcggggccagcctggacccaatcatgaggaagatgcagactcttatgagaacatggataatcccgatgggccagacccagcctggggaggagggggccgcatgggcacctggagcaccagg

SEQ ID NO: 103 - DNA, 579 bp, Homo sapiens
  Interleukin 18 (IL-18), isoform 1
atggctgctgaaccagtagaagacaattgcatcaactttgtggcaatgaaatttattgacaatacgctttactttatagctgaagatgatgaaaacctggaatcagattactttggcaagcttgaatctaaattatcagtcataagaaatttgaatgaccaagttctcttcattgaccaaggaaatcggcctctatttgaagatatgactgattctgactgtagagataatgcaccccggaccatatttattataagtatgtataaagatagccagcctagaggtatggctgtaactatctctgtgaagtgtgagaaaatttcaactctctcctgtgagaacaaaattatttcctttaaggaaatgaatcctcctgataacatcaaggatacaaaaagtgacatcatattctttcagagaagtgtcccaggacatgataataagatgcaatttgaatcttcatcatacgaaggatactttctagcttgtgaaaaagagagagacctttttaaactcattttgaaaaaagaggatgaattgggggatagatctataatgttcactgttcaaaacgaagac

SEQ ID NO: 104 - DNA, 1005 bp, Homo sapiens
  Fas ligand
atgctgggcatctggaccctcctacctctggttcttacgtctgttgctagattatcgtccaaaagtgttaatgcccaagtgactgacatcaactccaagggattggaattgaggaagactgttactacagttgagactcagaacttggaaggcctgcatcatgatggccaattctgccataagccctgtcctccaggtgaaaggaaagctagggactgcacagtcaatggggatgaaccagactgcgtgccctgccaagaagggaaggagtacacagacaaagcccatttttcttccaaatgcagaagatgtagattgtgtgatgaaggacatggcttagaagtggaaataaactgcacccggacccagaataccaagtgcagatgtaaaccaaactttttttgtaactctactgtatgtgaacactgtgacccttgcaccaaatgtgaacatggaatcatcaaggaatgcacactcaccagcaacaccaagtgcaaagaggaaggatccagatctaacttggggtggctttgtcttcttcttttgccaattccactaattgtttgggtgaagagaaaggaagtacagaaaacatgcagaaagcacagaaaggaaaaccaaggttctcatgaatctccaactttaaatcctgaaacagtggcaataaatttatctgatgttgacttgagtaaatatatcaccactattgctggagtcatgacactaagtcaagttaaaggctttgttcgaaagaatggtgtcaatgaagccaaaatagatgagatcaagaatgacaatgtccaagacacagcagaacagaaagttcaactgcttcgtaattggcatcaacttcatggaaagaaagaagcgtatgacacattgattaaagatctcaaaaaagccaatctttgtactcttgcagagaaaattcagactatcatcctcaaggacattactagtgactcagaaaattcaaacttcagaaatgaaatccaaagcttggtc

SEQ ID NO: 105 - DNA, 1023 bp, Salmonella typhimurium
  firA/SSC
atgccttcaattcgactggctgacttagcagaacagttggatgcagaattacacggtgatggcgatatcgtcatcaccggcgttgcgtccatgcaatctgcaacaacaggccacattacgtttatggtgaatcctaagtaccgtgaacacttaggtttatgccaggcttctgcggttgtcatgacgcaggacgatcttccttttgctaagagtgcggcgctggtagttaaaaatccctacctgacctacgcgcgcatggcgcaaattttagatactacgccgcagcccgcgcagaatatcgcgccaagcgccgtgattgatgcgacggcaacgctgggtagcaatgtttcagtcggcgcgaatgcggtgattgaatctggcgtacaactgggcgataacgtggttatcggcgcaggctgtttcgtcggaaaaaatagcaaaatcggggcgggttcacgcttgtgggcgaacgtaacgatttaccacgacattcagatcggtgagaattgcctgatccagtccagtacggtgatcggcgcggacggttttggctacgctaacgatcgtggcaactgggtgaagatcccacaactgggccgggtcattattggcgatcgtgtcgagatcggcgcttgtaccaccattgaccgtggcgcgttggatgatactgttattggcaatggcgtgattattgataatcagtgccagattgcacataacgtcgtgattggcgacaatacggcagttgccggtggcgtcattatggcgggtagcctgaagattggccgttactgcatgattggcggcgccagcgtgatcaatgggcatatggaaatatgcgacaaagtcacggtaactggcatgggtatggtgatgcgtcccatcacggaaccgggcgtctactcctcaggcattccgctgcaacccaacaaagtatggcgtaaaactgctgcactggtgatgaacattgatgatatgagcaagcgtctcaaagcgattgagcgcaaggttaatcaacaagac

SEQ ID NO: 106 - DNA, 918 bp, E. coli
  htrB
atgacgaatctacccaagttctccaccgcactgcttcatccgcgttattggttaacctggttgggtattggcgtactttggttagtcgtgcaattgccctacccggttatctaccgcctcggttgtggattaggaaaactggcgttacgttttatgaaacgacgcgcaaaaattgtgcatcgcaacctggaactgtgcttcccggaaatgagcgaacaagaacgccgtaaaatggtggtgaagaatttcgaatccgttggcatgggcctgatggaaaccggcatggcgtggttctggccggaccgccgaatcgcccgctggacggaagtgatcggcatggaacacattcgtgacgtgcaggcgcaaaaacgcggcatcctgttagttggcatccattttctgacactggagctgggtgcgcggcagtttggtatgcaggaaccgggtattggcgtttatcgcccgaacgataatccactgattgactggctacaaacctggggccgtttgcgctcaaataaatcgatgctcgaccgcaaagatttaaaaggcatgattaaagccctgaaaaaaggcgaagtggtctggtacgcaccggatcatgattacggcccgcgctcaagcgttttcgtcccgttgtttgccgttgagcaggctgcgaccacgaccggaacctggatgctggcacggatgtccggcgcatgtctggtgcccttcgttccacgccgtaagccagatggcaaagggtatcaattgattatgctgccgccagagtgttctccgccactggatgatgccgaaactaccgccgcgtggatgaacaaagtggtcgaaaaatgcatcatgatggcaccagagcagtatatgtggttacaccgtcgctttaaaacacgcccggaaggcgttccttcacgctat

SEQ ID NO: 107 - DNA, 717 bp, Salmonella typhimurium
  ompR
atgcaagagaattataagattctggtggttgatgacgatatgcgtctgcgggcgctactggaacgttatctgaccgagcagggcttccaggttcgaagcgtcgctaacgctgagcagatggatcgtctgctgacccgtgaatctttccatctcatggtactggatttaatgctgccaggtgaagatggtctgtcgatttgtcgtcgcctgcgtagtcaaagtaatccaatgccgatcattatggtcacggcgaagggtgaagaggttgaccgtatcgtcgggctggaaatcggcgccgatgactacattcctaaaccgtttaacccgcgcgagctgttggcgcgtattcggcccgtgttacgtcgtcaggcaaacgaactgcccggcgcgccgtcgcaggaagaggccgttatcgcgttcggtaagtttaaactgaacctcggtacgcgcgagatgttccgtgaagatgaaccgatgccgctgaccagcggggagtttgcggtactgaaagcgttagtcagccatccgcgcgagccgctctctcgcgataagctgatgaatctggcccgtggccgcgagtattccgcgatggaacgctccatcgacgtccagatctcccgcctgcgccgtatggtggaagaagatccggcacatccgcgttatattcagaccgtctggggcctgggctacgtctttgtaccggacggttctaaagca

SEQ ID NO: 108 - DNA, 498 bp, Homo sapiens
  Inteferon (IFN) gamma
atgaaatatacaagttatatcttggcttttcagctctgcatcgttttgggttctcttggctgttactgccaggacccatatgtaaaagaagcagaaaaccttaagaaatattttaatgcaggtcattcagatgtagcggataatggaactcttttcttaggcattttgaagaattggaaagaggagagtgacagaaaaataatgcagagccaaattgtctccttttacttcaaactttttaaaaactttaaagatgaccagagcatccaaaagagtgtggagaccatcaaggaagacatgaatgtcaagtttttcaatagcaacaaaaagaaacgagatgacttcgaaaagctgactaattattcggtaactgacttgaatgtccaacgcaaagcaatacatgaactcatccaagtgatggctgaactgtcgccagcagctaaaacagggaagcgaaaaaggagtcagatgctgtttcgaggtcgaagagcatcccag

SEQ ID NO: 109 - DNA, 699 bp, Homo sapiens
  Tumor necrosis factor (TNF) alpha
atgagcactgaaagcatgatccgggacgtggagctggccgaggaggcgctccccaagaagacaggggggccccagggctccaggcggtgcttgttcctcagcctcttctccttcctgatcgtggcaggcgccaccacgctcttctgcctgctgcactttggagtgatcggcccccagagggaagagttccccagggacctctctctaatcagccctctggcccaggcagtcagatcatcttctcgaaccccgagtgacaagcctgtagcccatgttgtagcaaaccctcaagctgaggggcagctccagtggctgaaccgccgggccaatgccctcctggccaatggcgtggagctgagagataaccagctggtggtgccatcagagggcctgtacctcatctactcccaggtcctcttcaagggccaaggctgcccctccacccatgtgctcctcacccacaccatcagccgcatcgccgtctcctaccagaccaaggtcaacctcctctctgccatcaagagcccctgccagagggagaccccagagggggctgaggccaagccctggtatgagcccatctatctgggaggggtcttccagctggagaagggtgaccgactcagcgctgagatcaatcggcccgactatctcgactttgccgagtctgggcaggtctactttgggatcattgccctg

SEQ ID NO: 110 - DNA, 825 bp, Homo sapiens
  Atg5 long isoform
atgacagatgacaaagatgtgcttcgagatgtgtggtttggacgaattccaacttgtttcacgctatatcaggatgagataactgaaagggaagcagaaccatactatttgcttttgccaagagtaagttatttgacgttggtaactgacaaagtgaaaaagcactttcagaaggttatgagacaagaagacattagtgagatatggtttgaatatgaaggcacaccactgaaatggcattatccaattggtttgctatttgatcttcttgcatcaagttcagctcttccttggaacatcacagtacattttaagagttttccagaaaaagaccttctgcactgtccatctaaggatgcaattgaagctcattttatgtcatgtatgaaagaagctgatgctttaaaacataaaagtcaagtaatcaatgaaatgcagaaaaaagatcacaagcaactctggatgggattgcaaaatgacagatttgaccagttttgggccatcaatcggaaactcatggaatatcctgcagaagaaaatggatttcgttatatcccctttagaatatatcagacaacgactgaaagacctttcattcagaagctgtttcgtcctgtggctgcagatggacagttgcacacactaggagatctcctcaaagaagtttgtccttctgctattgatcctgaagatggggaaaaaaagaatcaagtgatgattcatggaattgagccaatgttggaaacacctctgcagtggctgagtgaacatctgagctacccggataattttcttcatattagtatcatcccacagccaacagat

SEQ ID NO: 111 - DNA, 1350 bp, Homo sapiens
  Beclin1
atggaagggtctaagacgtccaacaacagcaccatgcaggtgagcttcgtgtgccagcgctgcagccagcccctgaaactggacacgagtttcaagatcctggaccgtgtcaccatccaggaactcacagctccattacttaccacagcccaggcgaaaccaggagagacccaggaggaagagactaactcaggagaggagccatttattgaaactcctcgccaggatggtgtctctcgcagattcatccccccagccaggatgatgtccacagaaagtgccaacagcttcactctgattggggaggcatctgatggcggcaccatggagaacctcagccgaagactgaaggtcactggggacctttttgacatcatgtcgggccagacagatgtggatcacccactctgtgaggaatgcacagatactcttttagaccagctggacactcagctcaacgtcactgaaaatgagtgtcagaactacaaacgctgtttggagatcttagagcaaatgaatgaggatgacagtgaacagttacagatggagctaaaggagctggcactagaggaggagaggctgatccaggagctggaagacgtggaaaagaaccgcaagatagtggcagaaaatctcgagaaggtccaggctgaggctgagagactggatcaggaggaagctcagtatcagagagaatacagtgaatttaaacgacagcagctggagctggatgatgagctgaagagtgttgaaaaccagatgcgttatgcccagacgcagctggataagctgaagaaaaccaacgtctttaatgcaaccttccacatctggcacagtggacagtttggcacaatcaataacttcaggctgggtcgcctgcccagtgttcccgtggaatggaatgagattaatgctgcttggggccagactgtgttgctgctccatgctctggccaataagatgggtctgaaatttcagagataccgacttgttccttacggaaaccattcatatctggagtctctgacagacaaatctaaggagctgccgttatactgttctggggggttgcggtttttctgggacaacaagtttgaccatgcaatggtggctttcctggactgtgtgcagcagttcaaagaagaggttgagaaaggcgagacacgtttttgtcttccctacaggatggatgtggagaaaggcaagattgaagacacaggaggcagtggcggctcctattccatcaaaacccagtttaactctgaggagcagtggacaaaagctctcaagttcatgctgacgaatcttaagtggggtcttgcttgggtgtcctcacaattttataacaaa

SEQ ID NO: 112 - DNA, 2352 bp, Homo sapiens
  Toll-like receptor 2 (TLR2)
atgccacatactttgtggatggtgtgggtcttgggggtcatcatcagcctctccaaggaagaatcctccaatcaggcttctctgtcttgtgaccgcaatggtatctgcaagggcagctcaggatctttaaactccattccctcagggctcacagaagctgtaaaaagccttgacctgtccaacaacaggatcacctacattagcaacagtgacctacagaggtgtgtgaacctccaggctctggtgctgacatccaatggaattaacacaatagaggaagattctttttcttccctgggcagtcttgaacatttagacttatcctataattacttatctaatttatcgtcttcctggttcaagcccctttcttctttaacattcttaaacttactgggaaatccttacaaaaccctaggggaaacatctcttttttctcatctcacaaaattgcaaatcctgagagtgggaaatatggacaccttcactaagattcaaagaaaagattttgctggacttaccttccttgaggaacttgagattgatgcttcagatctacagagctatgagccaaaaagtttgaagtcaattcagaatgtaagtcatctgatccttcatatgaagcagcatattttactgctggagatttttgtagatgttacaagttccgtggaatgtttggaactgcgagatactgatttggacactttccatttttcagaactatccactggtgaaacaaattcattgattaaaaagtttacatttagaaatgtgaaaatcaccgatgaaagtttgtttcaggttatgaaacttttgaatcagatttctggattgttagaattagagtttgatgactgtacccttaatggagttggtaattttagagcatctgataatgacagagttatagatccaggtaaagtggaaacgttaacaatccggaggctgcatattccaaggttttacttattttatgatctgagcactttatattcacttacagaaagagttaaaagaatcacagtagaaaacagtaaagtttttctggttccttgtttactttcacaacatttaaaatcattagaatacttggatctcagtgaaaatttgatggttgaagaatacttgaaaaattcagcctgtgaggatgcctggccctctctacaaactttaattttaaggcaaaatcatttggcatcattggaaaaaaccggagagactttgctcactctgaaaaacttgactaacattgatatcagtaagaatagttttcattctatgcctgaaacttgtcagtggccagaaaagatgaaatatttgaacttatccagcacacgaatacacagtgtaacaggctgcattcccaagacactggaaattttagatgttagcaacaacaatctcaatttattttctttgaatttgccgcaactcaaagaactttatatttccagaaataagttgatgactctaccagatgcctccctcttacccatgttactagtattgaaaatcagtaggaatgcaataactacgttttctaaggagcaacttgactcatttcacacactgaagactttggaagctggtggcaataacttcatttgctcctgtgaattcctctccttcactcaggagcagcaagcactggccaaagtcttgattgattggccagcaaattacctgtgtgactctccatcccatgtgcgtggccagcaggttcaggatgtccgcctctcggtgtcggaatgtcacaggacagcactggtgtctggcatgtgctgtgctctgttcctgctgatcctgctcacgggggtcctgtgccaccgtttccatggcctgtggtatatgaaaatgatgtgggcctggctccaggccaaaaggaagcccaggaaagctcccagcaggaacatctgctatgatgcatttgtttcttacagtgagcgggatgcctactgggtggagaaccttatggtccaggagctggagaacttcaatccccccttcaagttgtgtcttcataagcgggacttcattcctggcaagtggatcattgacaatatcattgactccattgaaaagagccacaaaactgtctttgtgctttctgaaaactttgtgaagagtgagtggtgcaagtatgaactggacttctcccatttccgtctttttgatgagaacaatgatgctgccattctcattcttctggagcccattgagaaaaaagccattccccagcgcttctgcaagctgcggaagataatgaacaccaagacctacctggagtggcccatggacgaggctcagcgggaaggattttgggtaaatctgagagctgcgataaagtcc

SEQ ID NO: 113 - DNA, 2517 bp, Homo sapiens
  TLR4, isoform 1
atgatgtctgcctcgcgcctggctgggactctgatcccagccatggccttcctctcctgcgtgagaccagaaagctgggagccctgcgtggaggtggttcctaatattacttatcaatgcatggagctgaatttctacaaaatccccgacaacctccccttctcaaccaagaacctggacctgagctttaatcccctgaggcatttaggcagctatagcttcttcagtttcccagaactgcaggtgctggatttatccaggtgtgaaatccagacaattgaagatggggcatatcagagcctaagccacctctctaccttaatattgacaggaaaccccatccagagtttagccctgggagccttttctggactatcaagtttacagaagctggtggctgtggagacaaatctagcatctctagagaacttccccattggacatctcaaaactttgaaagaacttaatgtggctcacaatcttatccaatctttcaaattacctgagtatttttctaatctgaccaatctagagcacttggacctttccagcaacaagattcaaagtatttattgcacagacttgcgggttctacatcaaatgcccctactcaatctctctttagacctgtccctgaaccctatgaactttatccaaccaggtgcatttaaagaaattaggcttcataagctgactttaagaaataattttgatagtttaaatgtaatgaaaacttgtattcaaggtctggctggtttagaagtccatcgtttggttctgggagaatttagaaatgaaggaaacttggaaaagtttgacaaatctgctctagagggcctgtgcaatttgaccattgaagaattccgattagcatacttagactactacctcgatgatattattgacttatttaattgtttgacaaatgtttcttcattttccctggtgagtgtgactattgaaagggtaaaagacttttcttataatttcggatggcaacatttagaattagttaactgtaaatttggacagtttcccacattgaaactcaaatctctcaaaaggcttactttcacttccaacaaaggtgggaatgctttttcagaagttgatctaccaagccttgagtttctagatctcagtagaaatggcttgagtttcaaaggttgctgttctcaaagtgattttgggacaaccagcctaaagtatttagatctgagcttcaatggtgttattaccatgagttcaaacttcttgggcttagaacaactagaacatctggatttccagcattccaatttgaaacaaatgagtgagttttcagtattcctatcactcagaaacctcatttaccttgacatttctcatactcacaccagagttgctttcaatggcatcttcaatggcttgtccagtctcgaagtcttgaaaatggctggcaattctttccaggaaaacttccttccagatatcttcacagagctgagaaacttgaccttcctggacctctctcagtgtcaactggagcagttgtctccaacagcatttaactcactctccagtcttcaggtactaaatatgagccacaacaacttcttttcattggatacgtttccttataagtgtctgaactccctccaggttcttgattacagtctcaatcacataatgacttccaaaaaacaggaactacagcattttccaagtagtctagctttcttaaatcttactcagaatgactttgcttgtacttgtgaacaccagagtttcctgcaatggatcaaggaccagaggcagctcttggtggaagttgaacgaatggaatgtgcaacaccttcagataagcagggcatgcctgtgctgagtttgaatatcacctgtcagatgaataagaccatcattggtgtgtcggtcctcagtgtgcttgtagtatctgttgtagcagttctggtctataagttctattttcacctgatgcttcttgctggctgcataaagtatggtagaggtgaaaacatctatgatgcctttgttatctactcaagccaggatgaggactgggtaaggaatgagctagtaaagaatttagaagaaggggtgcctccatttcagctctgccttcactacagagactttattcccggtgtggccattgctgccaacatcatccatgaaggtttccataaaagccgaaaggtgattgttgtggtgtcccagcacttcatccagagccgctggtgtatctttgaatatgagattgctcagacctggcagtttctgagcagtcgtgctggtatcatcttcattgtcctgcagaaggtggagaagaccctgctcaggcagcaggtggagctgtaccgccttctcagcaggaacacttacctggagtgggaggacagtgtcctggggcggcacatcttctggagacgactcagaaaagccctgctggatggtaaatcatggaatccagaaggaacagtgggtacaggatgcaattggcaggaagcaacatctatc

SEQ ID NO: 114 - DNA, 2574 bp, Homo sapiens
  TLR5
atgggagaccacctggaccttctcctaggagtggtgctcatggccggtcctgtgtttggaattccttcctgctcctttgatggccgaatagccttttatcgtttctgcaacctcacccaggtcccccaggtcctcaacaccactgagaggctcctgctgagcttcaactatatcaggacagtcactgcttcatccttcccctttctggaacagctgcagctgctggagctcgggagccagtatacccccttgactattgacaaggaggccttcagaaacctgcccaaccttagaatcttggacctgggaagtagtaagatatacttcttgcatccagatgcttttcagggactgttccatctgtttgaacttagactgtatttctgtggtctctctgatgctgtattgaaagatggttatttcagaaatttaaaggctttaactcgcttggatctatccaaaaatcagattcgtagcctttaccttcatccttcatttgggaagttgaattccttaaagtccatagatttttcctccaaccaaatattccttgtatgtgaacatgagctcgagcccctacaagggaaaacgctctccttttttagcctcgcagctaatagcttgtatagcagagtctcagtggactggggaaaatgtatgaacccattcagaaacatggtgctggagatactagatgtttctggaaatggctggacagtggacatcacaggaaactttagcaatgccatcagcaaaagccaggccttctctttgattcttgcccaccacatcatgggtgccgggtttggcttccataacatcaaagatcctgaccagaacacatttgctggcctggccagaagttcagtgagacacctggatctttcacatgggtttgtcttctccctgaactcacgagtctttgagacactcaaggatttgaaggttctgaaccttgcctacaacaagataaataagattgcagatgaagcattttacggacttgacaacctccaagttctcaatttgtcatataaccttctgggggaactttacagttcgaatttctatggactacctaaggtagcctacattgatttgcaaaagaatcacattgcaataattcaagaccaaacattcaaattcctggaaaaattacagaccttggatctccgagacaatgctcttacaaccattcattttattccaagcatacccgatatcttcttgagtggcaataaactagtgactttgccaaagatcaaccttacagcgaacctcatccacttatcagaaaacaggctagaaaatctagatattctctactttctcctacgggtacctcatctccagattctcattttaaatcaaaatcgcttctcctcctgtagtggagatcaaaccccttcagagaatcccagcttagaacagcttttccttggagaaaatatgttgcaacttgcctgggaaactgagctctgttgggatgtttttgagggactttctcatcttcaagttctgtatttgaatcataactatcttaattcccttccaccaggagtatttagccatctgactgcattaaggggactaagcctcaactccaacaggctgacagttctttctcacaatgatttacctgctaatttagagatcctggacatatccaggaaccagctcctagctcctaatcctgatgtatttgtatcacttagtgtcttggatataactcataacaagttcatttgtgaatgtgaacttagcacttttatcaattggcttaatcacaccaatgtcactatagctgggcctcctgcagacatatattgtgtgtaccctgactcgttctctggggtttccctcttctctctttccacggaaggttgtgatgaagaggaagtcttaaagtccctaaagttctcccttttcattgtatgcactgtcactctgactctgttcctcatgaccatcctcacagtcacaaagttccggggcttctgttttatctgttataagacagcccagagactggtgttcaaggaccatccccagggcacagaacctgatatgtacaaatatgatgcctatttgtgcttcagcagcaaagacttcacatgggtgcagaatgctttgctcaaacacctggacactcaatacagtgaccaaaacagattcaacctgtgctttgaagaaagagactttgtcccaggagaaaaccgcattgccaatatccaggatgccatctggaacagtagaaagatcgtttgtcttgtgagcagacacttccttagagatggctggtgccttgaagccttcagttatgcccagggcaggtgcttatctgaccttaacagtgctctcatcatggtggtggttgggtccttgtcccagtaccagttgatgaaacatcaatccatcagaggctttgtacagaaacagcagtatttgaggtggcctgaggatctccaggatgttggctggtttcttcataaactctctcaacagatactaaagaaagaaaaagaaaagaagaaagacaataacattccgttgcaaactgtagcaaccatctcc

SEQ ID NO: 115 - DNA, 2712 bp, Homo sapiens
  TLR3, isoform 1
atgagacagactttgccttgtatctacttttgggggggccttttgccctttgggatgctgtgtgcatcctccaccaccaagtgcactgttagccatgaagttgctgactgcagccacctgaagttgactcaggtacccgatgatctacccacaaacataacagtgttgaaccttacccataatcaactcagaagattaccagccgccaacttcacaaggtatagccagctaactagcttggatgtaggatttaacaccatctcaaaactggagccagaattgtgccagaaacttcccatgttaaaagttttgaacctccagcacaatgagctatctcaactttctgataaaacctttgccttctgcacgaatttgactgaactccatctcatgtccaactcaatccagaaaattaaaaataatccctttgtcaagcagaagaatttaatcacattagatctgtctcataatggcttgtcatctacaaaattaggaactcaggttcagctggaaaatctccaagagcttctattatcaaacaataaaattcaagcgctaaaaagtgaagaactggatatctttgccaattcatctttaaaaaaattagagttgtcatcgaatcaaattaaagagttttctccagggtgttttcacgcaattggaagattatttggcctctttctgaacaatgtccagctgggtcccagccttacagagaagctatgtttggaattagcaaacacaagcattcggaatctgtctctgagtaacagccagctgtccaccaccagcaatacaactttcttgggactaaagtggacaaatctcactatgctcgatctttcctacaacaacttaaatgtggttggtaacgattcctttgcttggcttccacaactagaatatttcttcctagagtataataatatacagcatttgttttctcactctttgcacgggcttttcaatgtgaggtacctgaatttgaaacggtcttttactaaacaaagtatttcccttgcctcactccccaagattgatgatttttcttttcagtggctaaaatgtttggagcaccttaacatggaagataatgatattccaggcataaaaagcaatatgttcacaggattgataaacctgaaatacttaagtctatccaactcctttacaagtttgcgaactttgacaaatgaaacatttgtatcacttgctcattctcccttacacatactcaacctaaccaagaataaaatctcaaaaatagagagtgatgctttctcttggttgggccacctagaagtacttgacctgggccttaatgaaattgggcaagaactcacaggccaggaatggagaggtctagaaaatattttcgaaatctatctttcctacaacaagtacctgcagctgactaggaactcctttgccttggtcccaagccttcaacgactgatgctccgaagggtggcccttaaaaatgtggatagctctccttcaccattccagcctcttcgtaacttgaccattctggatctaagcaacaacaacatagccaacataaatgatgacatgttggagggtcttgagaaactagaaattctcgatttgcagcataacaacttagcacggctctggaaacacgcaaaccctggtggtcccatttatttcctaaagggtctgtctcacctccacatccttaacttggagtccaacggctttgacgagatcccagttgaggtcttcaaggatttatttgaactaaagatcatcgatttaggattgaataatttaaacacacttccagcatctgtctttaataatcaggtgtctctaaagtcattgaaccttcagaagaatctcataacatccgttgagaagaaggttttcgggccagctttcaggaacctgactgagttagatatgcgctttaatccctttgattgcacgtgtgaaagtattgcctggtttgttaattggattaacgagacccataccaacatccctgagctgtcaagccactacctttgcaacactccacctcactatcatgggttcccagtgagactttttgatacatcatcttgcaaagacagtgccccctttgaactctttttcatgatcaataccagtatcctgttgatttttatctttattgtacttctcatccactttgagggctggaggatatctttttattggaatgtttcagtacatcgagttcttggtttcaaagaaatagacagacagacagaacagtttgaatatgcagcatatataattcatgcctataaagataaggattgggtctgggaacatttctcttcaatggaaaaggaagaccaatctctcaaattttgtctggaagaaagggactttgaggcgggtgtttttgaactagaagcaattgttaacagcatcaaaagaagcagaaaaattatttttgttataacacaccatctattaaaagacccattatgcaaaagattcaaggtacatcatgcagttcaacaagctattgaacaaaatctggattccattatattggttttccttgaggagattccagattataaactgaaccatgcactctgtttgcgaagaggaatgtttaaatctcactgcatcttgaactggccagttcagaaagaacggataggtgcctttcgtcataaattgcaagtagcacttggatccaaaaactctgtacat

SEQ ID NO: 116 - DNA, 3096 bp, Homo sapiens
  TLR9
atgggtttctgccgcagcgccctgcacccgctgtctctcctggtgcaggccatcatgctggccatgaccctggccctgggtaccttgcctgccttcctaccctgtgagctccagccccacggcctggtgaactgcaactggctgttcctgaagtctgtgccccacttctccatggcagcaccccgtggcaatgtcaccagcctttccttgtcctccaaccgcatccaccacctccatgattctgactttgcccacctgcccagcctgcggcatctcaacctcaagtggaactgcccgccggttggcctcagccccatgcacttcccctgccacatgaccatcgagcccagcaccttcttggctgtgcccaccctggaagagctaaacctgagctacaacaacatcatgactgtgcctgcgctgcccaaatccctcatatccctgtccctcagccataccaacatcctgatgctagactctgccagcctcgccggcctgcatgccctgcgcttcctattcatggacggcaactgttattacaagaacccctgcaggcaggcactggaggtggccccgggtgccctccttggcctgggcaacctcacccacctgtcactcaagtacaacaacctcactgtggtgccccgcaacctgccttccagcctggagtatctgctgttgtcctacaaccgcatcgtcaaactggcgcctgaggacctggccaatctgaccgccctgcgtgtgctcgatgtgggcggaaattgccgccgctgcgaccacgctcccaacccctgcatggagtgccctcgtcacttcccccagctacatcccgataccttcagccacctgagccgtcttgaaggcctggtgttgaaggacagttctctctcctggctgaatgccagttggttccgtgggctgggaaacctccgagtgctggacctgagtgagaacttcctctacaaatgcatcactaaaaccaaggccttccagggcctaacacagctgcgcaagcttaacctgtccttcaattaccaaaagagggtgtcctttgcccacctgtctctggccccttccttcgggagcctggtcgccctgaaggagctggacatgcacggcatcttcttccgctcactcgatgagaccacgctccggccactggcccgcctgcccatgctccagactctgcgtctgcagatgaacttcatcaaccaggcccagctcggcatcttcagggccttccctggcctgcgctacgtggacctgtcggacaaccgcatcagcggagcttcggagctgacagccaccatgggggaggcagatggaggggagaaggtctggctgcagcctggggaccttgctccggccccagtggacactcccagctctgaagacttcaggcccaactgcagcaccctcaacttcaccttggatctgtcacggaacaacctggtgaccgtgcagccggagatgtttgcccagctctcgcacctgcagtgcctgcgcctgagccacaactgcatctcgcaggcagtcaatggctcccagttcctgccgctgaccggtctgcaggtgctagacctgtcccacaataagctggacctctaccacgagcactcattcacggagctaccgcgactggaggccctggacctcagctacaacagccagccctttggcatgcagggcgtgggccacaacttcagcttcgtggctcacctgcgcaccctgcgccacctcagcctggcccacaacaacatccacagccaagtgtcccagcagctctgcagtacgtcgctgcgggccctggacttcagcggcaatgcactgggccatatgtgggccgagggagacctctatctgcacttcttccaaggcctgagcggtttgatctggctggacttgtcccagaaccgcctgcacaccctcctgccccaaaccctgcgcaacctccccaagagcctacaggtgctgcgtctccgtgacaattacctggccttctttaagtggtggagcctccacttcctgcccaaactggaagtcctcgacctggcaggaaaccagctgaaggccctgaccaatggcagcctgcctgctggcacccggctccggaggctggatgtcagctgcaacagcatcagcttcgtggcccccggcttcttttccaaggccaaggagctgcgagagctcaaccttagcgccaacgccctcaagacagtggaccactcctggtttgggcccctggcgagtgccctgcaaatactagatgtaagcgccaaccctctgcactgcgcctgtggggcggcctttatggacttcctgctggaggtgcaggctgccgtgcccggtctgcccagccgggtgaagtgtggcagtccgggccagctccagggcctcagcatctttgcacaggacctgcgcctctgcctggatgaggccctctcctgggactgtttcgccctctcgctgctggctgtggctctgggcctgggtgtgcccatgctgcatcacctctgtggctgggacctctggtactgcttccacctgtgcctggcctggcttccctggcgggggcggcaaagtgggcgagatgaggatgccctgccctacgatgccttcgtggtcttcgacaaaacgcagagcgcagtggcagactgggtgtacaacgagcttcgggggcagctggaggagtgccgtgggcgctgggcactccgcctgtgcctggaggaacgcgactggctgcctggcaaaaccctctttgagaacctgtgggcctcggtctatggcagccgcaagacgctgtttgtgctggcccacacggaccgggtcagtggtctcttgcgcgccagcttcctgctggcccagcagcgcctgctggaggaccgcaaggacgtcgtggtgctggtgatcctgagccctgacggccgccgctcccgctacgtgcggctgcgccagcgcctctgccgccagagtgtcctcctctggccccaccagcccagtggtcagcgcagcttctgggcccagctgggcatggccctgaccagggacaaccaccacttctataaccggaacttctgccagggacccacggccgaa

SEQ ID NO: 117 - DNA, 3147 bp, Homo sapiens
  TLR7
atggtgtttccaatgtggacactgaagagacaaattcttatcctttttaacataatcctaatttccaaactccttggggctagatggtttcctaaaactctgccctgtgatgtcactctggatgttccaaagaaccatgtgatcgtggactgcacagacaagcatttgacagaaattcctggaggtattcccacgaacaccacgaacctcaccctcaccattaaccacataccagacatctccccagcgtcctttcacagactggaccatctggtagagatcgatttcagatgcaactgtgtacctattccactggggtcaaaaaacaacatgtgcatcaagaggctgcagattaaacccagaagctttagtggactcacttatttaaaatccctttacctggatggaaaccagctactagagataccgcagggcctcccgcctagcttacagcttctcagccttgaggccaacaacatcttttccatcagaaaagagaatctaacagaactggccaacatagaaatactctacctgggccaaaactgttattatcgaaatccttgttatgtttcatattcaatagagaaagatgccttcctaaacttgacaaagttaaaagtgctctccctgaaagataacaatgtcacagccgtccctactgttttgccatctactttaacagaactatatctctacaacaacatgattgcaaaaatccaagaagatgattttaataacctcaaccaattacaaattcttgacctaagtggaaattgccctcgttgttataatgccccatttccttgtgcgccgtgtaaaaataattctcccctacagatccctgtaaatgcttttgatgcgctgacagaattaaaagttttacgtctacacagtaactctcttcagcatgtgcccccaagatggtttaagaacatcaacaaactccaggaactggatctgtcccaaaacttcttggccaaagaaattggggatgctaaatttctgcattttctccccagcctcatccaattggatctgtctttcaattttgaacttcaggtctatcgtgcatctatgaatctatcacaagcattttcttcactgaaaagcctgaaaattctgcggatcagaggatatgtctttaaagagttgaaaagctttaacctctcgccattacataatcttcaaaatcttgaagttcttgatcttggcactaactttataaaaattgctaacctcagcatgtttaaacaatttaaaagactgaaagtcatagatctttcagtgaataaaatatcaccttcaggagattcaagtgaagttggcttctgctcaaatgccagaacttctgtagaaagttatgaaccccaggtcctggaacaattacattatttcagatatgataagtatgcaaggagttgcagattcaaaaacaaagaggcttctttcatgtctgttaatgaaagctgctacaagtatgggcagaccttggatctaagtaaaaatagtatattttttgtcaagtcctctgattttcagcatctttctttcctcaaatgcctgaatctgtcaggaaatctcattagccaaactcttaatggcagtgaattccaacctttagcagagctgagatatttggacttctccaacaaccggcttgatttactccattcaacagcatttgaagagcttcacaaactggaagttctggatataagcagtaatagccattattttcaatcagaaggaattactcatatgctaaactttaccaagaacctaaaggttctgcagaaactgatgatgaacgacaatgacatctcttcctccaccagcaggaccatggagagtgagtctcttagaactctggaattcagaggaaatcacttagatgttttatggagagaaggtgataacagatacttacaattattcaagaatctgctaaaattagaggaattagacatctctaaaaattccctaagtttcttgccttctggagtttttgatggtatgcctccaaatctaaagaatctctctttggccaaaaatgggctcaaatctttcagttggaagaaactccagtgtctaaagaacctggaaactttggacctcagccacaaccaactgaccactgtccctgagagattatccaactgttccagaagcctcaagaatctgattcttaagaataatcaaatcaggagtctgacgaagtattttctacaagatgccttccagttgcgatatctggatctcagctcaaataaaatccagatgatccaaaagaccagcttcccagaaaatgtcctcaacaatctgaagatgttgcttttgcatcataatcggtttctgtgcacctgtgatgctgtgtggtttgtctggtgggttaaccatacggaggtgactattccttacctggccacagatgtgacttgtgtggggccaggagcacacaagggccaaagtgtgatctccctggatctgtacacctgtgagttagatctgactaacctgattctgttctcactttccatatctgtatctctctttctcatggtgatgatgacagcaagtcacctctatttctgggatgtgtggtatatttaccatttctgtaaggccaagataaaggggtatcagcgtctaatatcaccagactgttgctatgatgcttttattgtgtatgacactaaagacccagctgtgaccgagtgggttttggctgagctggtggccaaactggaagacccaagagagaaacattttaatttatgtctcgaggaaagggactggttaccagggcagccagttctggaaaacctttcccagagcatacagcttagcaaaaagacagtgtttgtgatgacagacaagtatgcaaagactgaaaattttaagatagcattttacttgtcccatcagaggctcatggatgaaaaagttgatgtgattatcttgatatttcttgagaagccctttcagaagtccaagttcctccagctccggaaaaggctctgtgggagttctgtccttgagtggccaacaaacccgcaagctcacccatacttctggcagtgtctaaagaacgccctggccacagacaatcatgtggcctatagtcaggtgttcaaggaaacggtc

SEQ ID NO: 118 - DNA, 3177 bp, Homo sapiens
  TLR8, isoform 1
atgaaggagtcatctttgcaaaatagctcctgcagcctgggaaaggagactaaaaaggaaaacatgttccttcagtcgtcaatgctgacctgcattttcctgctaatatctggttcctgtgagttatgcgccgaagaaaatttttctagaagctatccttgtgatgagaaaaagcaaaatgactcagttattgcagagtgcagcaatcgtcgactacaggaagttccccaaacggtgggcaaatatgtgacagaactagacctgtctgataatttcatcacacacataacgaatgaatcatttcaagggctgcaaaatctcactaaaataaatctaaaccacaaccccaatgtacagcaccagaacggaaatcccggtatacaatcaaatggcttgaatatcacagacggggcattcctcaacctaaaaaacctaagggagttactgcttgaagacaaccagttaccccaaataccctctggtttgccagagtctttgacagaacttagtctaattcaaaacaatatatacaacataactaaagagggcatttcaagacttataaacttgaaaaatctctatttggcctggaactgctattttaacaaagtttgcgagaaaactaacatagaagatggagtatttgaaacgctgacaaatttggagttgctatcactatctttcaattctctttcacacgtgccacccaaactgccaagctccctacgcaaactttttctgagcaacacccagatcaaatacattagtgaagaagatttcaagggattgataaatttaacattactagatttaagcgggaactgtccgaggtgcttcaatgccccatttccatgcgtgccttgtgatggtggtgcttcaattaatatagatcgttttgcttttcaaaacttgacccaacttcgatacctaaacctctctagcacttccctcaggaagattaatgctgcctggtttaaaaatatgcctcatctgaaggtgctggatcttgaattcaactatttagtgggagaaatagcctctggggcatttttaacgatgctgccccgcttagaaatacttgacttgtcttttaactatataaaggggagttatccacagcatattaatatttccagaaacttctctaaacttttgtctctacgggcattgcatttaagaggttatgtgttccaggaactcagagaagatgatttccagcccctgatgcagcttccaaacttatcgactatcaacttgggtattaattttattaagcaaatcgatttcaaacttttccaaaatttctccaatctggaaattatttacttgtcagaaaacagaatatcaccgttggtaaaagatacccggcagagttatgcaaatagttcctcttttcaacgtcatatccggaaacgacgctcaacagattttgagtttgacccacattcgaacttttatcatttcacccgtcctttaataaagccacaatgtgctgcttatggaaaagccttagatttaagcctcaacagtattttcttcattgggccaaaccaatttgaaaatcttcctgacattgcctgtttaaatctgtctgcaaatagcaatgctcaagtgttaagtggaactgaattttcagccattcctcatgtcaaatatttggatttgacaaacaatagactagactttgataatgctagtgctcttactgaattgtccgacttggaagttctagatctcagctataattcacactatttcagaatagcaggcgtaacacatcatctagaatttattcaaaatttcacaaatctaaaagttttaaacttgagccacaacaacatttatactttaacagataagtataacctggaaagcaagtccctggtagaattagttttcagtggcaatcgccttgacattttgtggaatgatgatgacaacaggtatatctccattttcaaaggtctcaagaatctgacacgtctggatttatcccttaataggctgaagcacatcccaaatgaagcattccttaatttgccagcgagtctcactgaactacatataaatgataatatgttaaagttttttaactggacattactccagcagtttcctcgtctcgagttgcttgacttacgtggaaacaaactactctttttaactgatagcctatctgactttacatcttcccttcggacactgctgctgagtcataacaggatttcccacctaccctctggctttctttctgaagtcagtagtctgaagcacctcgatttaagttccaatctgctaaaaacaatcaacaaatccgcacttgaaactaagaccaccaccaaattatctatgttggaactacacggaaacccctttgaatgcacctgtgacattggagatttccgaagatggatggatgaacatctgaatgtcaaaattcccagactggtagatgtcatttgtgccagtcctggggatcaaagagggaagagtattgtgagtctggagctaacaacttgtgtttcagatgtcactgcagtgatattatttttcttcacgttctttatcaccaccatggttatgttggctgccctggctcaccatttgttttactgggatgtttggtttatatataatgtgtgtttagctaaggtaaaaggctacaggtctctttccacatcccaaactttctatgatgcttacatttcttatgacaccaaagatgcctctgttactgactgggtgataaatgagctgcgctaccaccttgaagagagccgagacaaaaacgttctcctttgtctagaggagagggattgggacccgggattggccatcatcgacaacctcatgcagagcatcaaccaaagcaagaaaacagtatttgttttaaccaaaaaatatgcaaaaagctggaactttaaaacagctttttacttggctttgcagaggctaatggatgagaacatggatgtgattatatttatcctgctggagccagtgttacagcattctcagtatttgaggctacggcagcggatctgtaagagctccatcctccagtggcctgacaacccgaaggcagaaggcttgttttggcaaactctgagaaatgtggtcttgactgaaaatgattcacggtataacaatatgtatgtcgattccattaagcaatac

SEQ ID NO: 119 - DNA, 636 bp, Homo sapiens
  Interleukin 6 (IL-6)
atgaactccttctccacaagcgccttcggtccagttgccttctccctggggctgctcctggtgttgcctgctgccttccctgccccagtacccccaggagaagattccaaagatgtagccgccccacacagacagccactcacctcttcagaacgaattgacaaacaaattcggtacatcctcgacggcatctcagccctgagaaaggagacatgtaacaagagtaacatgtgtgaaagcagcaaagaggcactggcagaaaacaacctgaaccttccaaagatggctgaaaaagatggatgcttccaatctggattcaatgaggagacttgcctggtgaaaatcatcactggtcttttggagtttgaggtatacctagagtacctccagaacagatttgagagtagtgaggaacaagccagagctgtgcagatgagtacaaaagtcctgatccagttcctgcagaaaaaggcaaagaatctagatgcaataaccacccctgacccaaccacaaatgccagcctgctgacgaagctgcaggcacagaaccagtggctgcaggacatgacaactcatctcattctgcgcagctttaaggagttcctgcagtccagcctgagggctcttcggcaaatg

SEQ ID NO: 120 - DNA, 951 bp, Homo sapiens
  MyD88, isoform 1
atgcgacccgaccgcgctgaggctccaggaccgcccgccatggctgcaggaggtcccggcgcggggtctgcggccccggtctcctccacatcctcccttcccctggctgctctcaacatgcgagtgcggcgccgcctgtctctgttcttgaacgtgcggacacaggtggcggccgactggaccgcgctggcggaggagatggactttgagtacttggagatccggcaactggagacacaagcggaccccactggcaggctgctggacgcctggcagggacgccctggcgcctctgtaggccgactgctcgagctgcttaccaagctgggccgcgacgacgtgctgctggagctgggacccagcattgaggaggattgccaaaagtatatcttgaagcagcagcaggaggaggctgagaagcctttacaggtggccgctgtagacagcagtgtcccacggacagcagagctggcgggcatcaccacacttgatgaccccctggggcatatgcctgagcgtttcgatgccttcatctgctattgccccagcgacatccagtttgtgcaggagatgatccggcaactggaacagacaaactatcgactgaagttgtgtgtgtctgaccgcgatgtcctgcctggcacctgtgtctggtctattgctagtgagctcatcgaaaagaggttggctagaaggccacggggtgggtgccgccggatggtggtggttgtctctgatgattacctgcagagcaaggaatgtgacttccagaccaaatttgcactcagcctctctccaggtgcccatcagaagcgactgatccccatcaagtacaaggcaatgaagaaagagttccccagcatcctgaggttcatcactgtctgcgactacaccaacccctgcaccaaatcttggttctggactcgccttgccaaggccttgtccctgccc

SEQ ID NO: 121 - DNA, 807 bp, Homo sapiens
  Interleukin 1-beta (IL-1beta)
atggcagaagtacctgagctcgccagtgaaatgatggcttattacagtggcaatgaggatgacttgttctttgaagctgatggccctaaacagatgaagtgctccttccaggacctggacctctgccctctggatggcggcatccagctacgaatctccgaccaccactacagcaagggcttcaggcaggccgcgtcagttgttgtggccatggacaagctgaggaagatgctggttccctgcccacagaccttccaggagaatgacctgagcaccttctttcccttcatctttgaagaagaacctatcttcttcgacacatgggataacgaggcttatgtgcacgatgcacctgtacgatcactgaactgcacgctccgggactcacagcaaaaaagcttggtgatgtctggtccatatgaactgaaagctctccacctccagggacaggatatggagcaacaagtggtgttctccatgtcctttgtacaaggagaagaaagtaatgacaaaatacctgtggccttgggcctcaaggaaaagaatctgtacctgtcctgcgtgttgaaagatgataagcccactctacagctggagagtgtagatcccaaaaattacccaaagaagaagatggaaaagcgatttgtcttcaacaagatagaaatcaataacaagctggaatttgagtctgcccagttccccaactggtacatcagcacctctcaagcagaaaacatgcccgtcttcctgggagggaccaaaggcggccaggatataactgacttcaccatgcaatttgtgtcttcc

SEQ ID NO: 122 - DNA, 3075 bp, Homo sapiens
  MDA5/IFIH1, isoform 1
atgtcgaatgggtattccacagacgagaatttccgctatctcatctcgtgcttcagggccagggtgaaaatgtacatccaggtggagcctgtgctggactacctgacctttctgcctgcagaggtgaaggagcagattcagaggacagtcgccacctccgggaacatgcaggcagttgaactgctgctgagcaccttggagaagggagtctggcaccttggttggactcgggaattcgtggaggccctccggagaaccggcagccctctggccgcccgctacatgaaccctgagctcacggacttgccctctccatcgtttgagaacgctcatgatgaatatctccaactgctgaacctccttcagcccactctggtggacaagcttctagttagagacgtcttggataagtgcatggaggaggaactgttgacaattgaagacagaaaccggattgctgctgcagaaaacaatggaaatgaatcaggtgtaagagagctactaaaaaggattgtgcagaaagaaaactggttctctgcatttctgaatgttcttcgtcaaacaggaaacaatgaacttgtccaagagttaacaggctctgattgctcagaaagcaatgcagagattgagaatttatcacaagttgatggtcctcaagtggaagagcaacttctttcaaccacagttcagccaaatctggagaaggaggtctggggcatggagaataactcatcagaatcatcttttgcagattcttctgtagtttcagaatcagacacaagtttggcagaaggaagtgtcagctgcttagatgaaagtcttggacataacagcaacatgggcagtgattcaggcaccatgggaagtgattcagatgaagagaatgtggcagcaagagcatccccggagccagaactccagctcaggccttaccaaatggaagttgcccagccagccttggaagggaagaatatcatcatctgcctccctacagggagtggaaaaaccagagtggctgtttacattgccaaggatcacttagacaagaagaaaaaagcatctgagcctggaaaagttatagttcttgtcaataaggtactgctagttgaacagctcttccgcaaggagttccaaccatttttgaagaaatggtatcgtgttattggattaagtggtgatacccaactgaaaatatcatttccagaagttgtcaagtcctgtgatattattatcagtacagctcaaatccttgaaaactccctcttaaacttggaaaatggagaagatgctggtgttcaattgtcagacttttccctcattatcattgatgaatgtcatcacaccaacaaagaagcagtgtataataacatcatgaggcattatttgatgcagaagttgaaaaacaatagactcaagaaagaaaacaaaccagtgattccccttcctcagatactgggactaacagcttcacctggtgttggaggggccacgaagcaagccaaagctgaagaacacattttaaaactatgtgccaatcttgatgcatttactattaaaactgttaaagaaaaccttgatcaactgaaaaaccaaatacaggagccatgcaagaagtttgccattgcagatgcaaccagagaagatccatttaaagagaaacttctagaaataatgacaaggattcaaacttattgtcaaatgagtccaatgtcagattttggaactcaaccctatgaacaatgggccattcaaatggaaaaaaaagctgcaaaagaaggaaatcgcaaagaacgtgtttgtgcagaacatttgaggaagtacaatgaggccctacaaattaatgacacaattcgaatgatagatgcgtatactcatcttgaaactttctataatgaagagaaagataagaagtttgcagtcatagaagatgatagtgatgagggtggtgatgatgagtattgtgatggtgatgaagatgaggatgatttaaagaaacctttgaaactggatgaaacagatagatttctcatgactttattttttgaaaacaataaaatgttgaaaaggctggctgaaaacccagaatatgaaaatgaaaagctgaccaaattaagaaataccataatggagcaatatactaggactgaggaatcagcacgaggaataatctttacaaaaacacgacagagtgcatatgcgctttcccagtggattactgaaaatgaaaaatttgctgaagtaggagtcaaagcccaccatctgattggagctggacacagcagtgagttcaaacccatgacacagaatgaacaaaaagaagtcattagtaaatttcgcactggaaaaataaatctgcttatcgctaccacagtggcagaagaaggtctggatattaaagaatgtaacattgttatccgttatggtctcgtcaccaatgaaatagccatggtccaggcccgtggtcgagccagagctgatgagagcacctacgtcctggttgctcacagtggttcaggagttatcgaacatgagacagttaatgatttccgagagaagatgatgtataaagctatacattgtgttcaaaatatgaaaccagaggagtatgctcataagattttggaattacagatgcaaagtataatggaaaagaaaatgaaaaccaagagaaatattgccaagcattacaagaataacccatcactaataactttcctttgcaaaaactgcagtgtgctagcctgttctggggaagatatccatgtaattgagaaaatgcatcacgtcaatatgaccccagaattcaaggaactttacattgtaagagaaaacaaagcactgcaaaagaagtgtgccgactatcaaataaatggtgaaatcatctgcaaatgtggccaggcttggggaacaatgatggtgcacaaaggcttagatttgccttgtctcaaaataaggaattttgtagtggttttcaaaaataattcaacaaagaaacaatacaaaaagtgggtagaattacctatcacatttcccaatcttgactattcagaatgctgtttatttagtgatgaggat

SEQ ID NO: 123 - DNA, 1620 bp, Homo sapiens
  IPS-1/MAVS, isoform 1
atgccgtttgctgaagacaagacctataagtatatctgccgcaatttcagcaatttttgcaatgtggatgttgtagagattctgccttacctgccctgcctcacagcaagagaccaggatcgactgcgggccacctgcacactctcagggaaccgggacaccctctggcatctcttcaatacccttcagcggcggcccggctgggtggagtacttcattgcggcactgaggggctgtgagctagttgatctcgcggacgaagtggcctctgtctaccagagctaccagcctcggacctcggaccgtcccccagacccactggagccaccgtcacttcctgctgagaggccagggccccccacacctgctgcggcccacagcatcccctacaacagctgcagagagaaggagccaagttaccccatgcctgtccaggagacccaggcgccagagtccccaggagagaattcagagcaagccctgcagacgctcagccccagagccatcccaaggaatccagatggtggccccctggagtcctcctctgacctggcagccctcagccctctgacctccagcgggcatcaggagcaggacacagaactgggcagtacccacacagcaggtgcgacctccagcctcacaccatcccgtgggcctgtgtctccatctgtctccttccagcccctggcccgttccacccccagggcaagccgcttgcctggacccacagggtcagttgtatctactggcacctccttctcctcctcatcccctggcttggcctctgcaggggctgcagagggtaaacagggtgcagagagtgaccaggccgagcctatcatctgctccagtggggcagaggcacctgccaactctctgccctccaaagtgcctaccaccttgatgcctgtgaacacagtggccctgaaagtgcctgccaacccagcatctgtcagcacagtgccctccaagttgccaactagctcaaagccccctggtgcagtgccttctaatgcgctcaccaatccagcaccatccaaattgcccatcaactcaacccgtgctggcatggtgccatccaaagtgcctactagcatggtgctcaccaaggtgtctgccagcacagtccccactgacgggagcagcagaaatgaggagaccccagcagctccaacacccgccggcgccactggaggcagctcagcctggctagacagcagctctgagaataggggccttgggtcggagctgagtaagcctggcgtgctggcatcccaggtagacagcccgttctcgggctgcttcgaggatcttgccatcagtgccagcacctccttgggcatggggccctgccatggcccagaggagaatgagtataagtccgagggcacctttgggatccacgtggctgagaaccccagcatccagctcctggagggcaaccctgggccacctgcggacccggatggcggccccaggccacaagccgaccggaagttccaggagagggaggtgccatgccacaggccctcacctggggctctgtggctccaggtggctgtgacaggggtgctggtagtcacactcctggtggtgctgtaccggcggcgtctgcac

SEQ ID NO: 124 - DNA, 2775 bp, Homo sapiens
  RIG-1/DDX58, isoform 1
atgaccaccgagcagcgacgcagcctgcaagccttccaggattatatccggaagaccctggaccctacctacatcctgagctacatggccccctggtttagggaggaagaggtgcagtatattcaggctgagaaaaacaacaagggcccaatggaggctgccacactttttctcaagttcctgttggagctccaggaggaaggctggttccgtggctttttggatgccctagaccatgcaggttattctggactttatgaagccattgaaagttgggatttcaaaaaaattgaaaagttggaggagtatagattacttttaaaacgtttacaaccagaatttaaaaccagaattatcccaaccgatatcatttctgatctgtctgaatgtttaattaatcaggaatgtgaagaaattctacagatttgctctactaaggggatgatggcaggtgcagagaaattggtggaatgccttctcagatcagacaaggaaaactggcccaaaactttgaaacttgctttggagaaagaaaggaacaagttcagtgaactgtggattgtagagaaaggtataaaagatgttgaaacagaagatcttgaggataagatggaaacttctgacatacagattttctaccaagaagatccagaatgccagaatcttagtgagaattcatgtccaccttcagaagtgtctgatacaaacttgtacagcccatttaaaccaagaaattaccaattagagcttgctttgcctgctatgaaaggaaaaaacacaataatatgtgctcctacaggttgtggaaaaacctttgtttcactgcttatatgtgaacatcatcttaaaaaattcccacaaggacaaaaggggaaagttgtcttttttgcgaatcagatcccagtgtatgaacagcagaaatctgtattctcaaaatactttgaaagacatgggtatagagttacaggcatttctggagcaacagctgagaatgtcccagtggaacagattgttgagaacaatgacatcatcattttaactccacagattcttgtgaacaaccttaaaaagggaacgattccatcactatccatctttactttgatgatatttgatgaatgccacaacactagtaaacaacacccgtacaatatgatcatgtttaattatctagatcagaaacttggaggatcttcaggcccactgccccaggtcattgggctgactgcctcggttggtgttggggatgccaaaaacacagatgaagccttggattatatctgcaagctgtgtgcttctcttgatgcgtcagtgatagcaacagtcaaacacaatctggaggaactggagcaagttgtttataagccccagaagtttttcaggaaagtggaatcacggattagcgacaaatttaaatacatcatagctcagctgatgagggacacagagagtctggcaaagagaatctgcaaagacctcgaaaacttatctcaaattcaaaatagggaatttggaacacagaaatatgaacaatggattgttacagttcagaaagcatgcatggtgttccagatgccagacaaagatgaagagagcaggatttgtaaagccctgtttttatacacttcacatttgcggaaatataatgatgccctcattatcagtgagcatgcacgaatgaaagatgctctggattacttgaaagacttcttcagcaatgtccgagcagcaggattcgatgagattgagcaagatcttactcagagatttgaagaaaagctgcaggaactagaaagtgtttccagggatcccagcaatgagaatcctaaacttgaagacctctgcttcatcttacaagaagagtaccacttaaacccagagacaataacaattctctttgtgaaaaccagagcacttgtggacgctttaaaaaattggattgaaggaaatcctaaactcagttttctaaaacctggcatattgactggacgtggcaaaacaaatcagaacacaggaatgaccctcccggcacagaagtgtatattggatgcattcaaagccagtggagatcacaatattctgattgccacctcagttgctgatgaaggcattgacattgcacagtgcaatcttgtcatcctttatgagtatgtgggcaatgtcatcaaaatgatccaaaccagaggcagaggaagagcaagaggtagcaagtgcttccttctgactagtaatgctggtgtaattgaaaaagaacaaataaacatgtacaaagaaaaaatgatgaatgactctattttacgccttcagacatgggacgaagcagtatttagggaaaagattctgcatatacagactcatgaaaaattcatcagagatagtcaagaaaaaccaaaacctgtacctgataaggaaaataaaaaactgctctgcagaaagtgcaaagccttggcatgttacacagctgacgtaagagtgatagaggaatgccattacactgtgcttggagatgcttttaaggaatgctttgtgagtagaccacatcccaagccaaagcagttttcaagttttgaaaaaagagcaaagatattctgtgcccgacagaactgcagccatgactggggaatccatgtgaagtacaagacatttgagattccagttataaaaattgaaagttttgtggtggaggatattgcaactggagttcagacactgtactcgaagtggaaggactttcattttgagaagataccatttgatccagcagaaatgtccaaa

SEQ ID NO: 125 - DNA, 1494 bp, Homo sapiens
  IRF5, transcript variant 2
atgaaccagtccatcccagtggctcccaccccaccccgccgcgtgcggctgaagccctggctggtggcccaggtgaacagctgccagtacccagggcttcaatgggtcaacggggaaaagaaattattctgcatcccctggaggcatgccacaaggcatggtcccagccaggacggagataacaccatcttcaaggcctgggccaaggagacagggaaatacaccgaaggcgtggatgaagccgatccggccaagtggaaggccaacctgcgctgtgcccttaacaagagccgggacttccgcctcatctacgacgggccccgggacatgccacctcagccctacaagatctacgaggtctgctccaatggccctgctcccacagactcccagccccctgaggattactcttttggtgcaggagaggaggaggaagaagaggaagagctgcagaggatgttgccaagcctgagcctcacagaggatgtcaagtggccgcccactctgcagccgcccactctgcggccgcctactctgcagccgcccactctgcagccgcccgtggtgctgggtccccctgctccagaccccagccccctggctcctccccctggcaaccctgctggcttcagggagcttctctctgaggtcctggagcctgggcccctgcctgccagcctgccccctgcaggcgaacagctcctgccagacctgctgatcagcccccacatgctgcctctgaccgacctggagatcaagtttcagtaccgggggcggccaccccgggccctcaccatcagcaacccccatggctgccggctcttctacagccagctggaggccacccaggagcaggtggaactcttcggccccataagcctggagcaagtgcgcttccccagccctgaggacatccccagtgacaagcagcgcttctacacgaaccagctgctggatgtcctggaccgcgggctcatcctccagctacagggccaggacctttatgccatccgcctgtgtcagtgcaaggtgttctggagcgggccttgtgcctcagcccatgactcatgccccaaccccatccagcgggaggtcaagaccaagcttttcagcctggagcattttctcaatgagctcatcctgttccaaaagggccagaccaacaccccaccacccttcgagatcttcttctgctttggggaagaatggcctgaccgcaaaccccgagagaagaagctcattactgtacaggtggtgcctgtagcagctcgactgctgctggagatgttctcaggggagctatcttggtcagctgatagtatccggctacagatctcaaacccagacctcaaagaccgcatggtggagcaattcaaggagctccatcacatctggcagtcccagcagcggttgcagcctgtggcccaggcccctcctggagcaggccttggtgttggccaggggccctggcctatgcacccagctggcatgcaa

SEQ ID NO: 126 - DNA, 1284 bp, Homo sapiens
  IRF3, isoform 1
accatgggaaccccaaagccacggatcctgccctggctggtgtcgcagctggacctggggcaactggagggcgtggcctgggtgaacaagagccgcacgcgcttccgcatcccttggaagcacggcctacggcaggatgcacagcaggaggatttcggaatcttccaggcctgggccgaggccactggtgcatatgttcccgggagggataagccagacctgccaacctggaagaggaatttccgctctgccctcaaccgcaaagaagggttgcgtttagcagaggaccggagcaaggaccctcacgacccacataaaatctacgagtttgtgaactcaggagttggggacttttcccagccagacacctctccggacaccaatggtggaggcagtacttctgatacccaggaagacattctggatgagttactgggtaacatggtgttggccccactcccagatccgggacccccaagcctggctgtagcccctgagccctgccctcagcccctgcggagccccagcttggacaatcccactcccttcccaaacctggggccctctgagaacccactgaagcggctgttggtgccgggggaagagtgggagttcgaggtgacagccttctaccggggccgccaagtcttccagcagaccatctcctgcccggagggcctgcggctggtggggtccgaagtgggagacaggacgctgcctggatggccagtcacactgccagaccctggcatgtccctgacagacaggggagtgatgagctacgtgaggcatgtgctgagctgcctgggtgggggactggctctctggcgggccgggcagtggctctgggcccagcggctggggcactgccacacatactgggcagtgagcgaggagctgctccccaacagcgggcatgggcctgatggcgaggtccccaaggacaaggaaggaggcgtgtttgacctggggcccttcattgtagatctgattaccttcacggaaggaagcggacgctcaccacgctatgccctctggttctgtgtgggggagtcatggccccaggaccagccgtggaccaagaggctcgtgatggtcaaggttgtgcccacgtgcctcagggccttggtagaaatggcccgggtagggggtgcctcctccctggagaatactgtggacctgcacatttccaacagccacccactctccctcacctccgaccagtacaaggcctacctgcaggacttggtggagggcatggatttccagggccctggggagagc

SEQ ID NO: 127 - DNA, 1275 bp, Homo sapiens
  TANK
atggataaaaacattggcgagcaactcaataaagcgtatgaagccttccggcaggcatgcatggatagagattctgcagtaaaagaattacagcaaaagactgagaactatgagcagagaatacgtgaacaacaggaacagctgtcacttcaacagactattattgacaagctaaaatctcagttacttcttgtgaattccactcaagataacaattatggctgtgttcctctgcttgaagacagtgaaacaagaaagaataatttgactcttgatcagccacaagataaagtgatttcaggaatagcaagagaaaaactaccaaaggtaagaagacaagaggtttcttctcctagaaaagaaacttcagcaaggagtcttggcagtcctttgctccatgaaaggggtaatatagagaagactttctgggatctgaaagaagaatttcataaaatatgcatgctagcaaaagcacagaaagaccacttaagcaaacttaatataccagacactgcaactgaaacacagtgctctgtgcctatacagtgtacggataaaacagataaacaagaagcgctgtttaagcctcaggctaaagatgatataaatagaggtgcaccatccatcacatctgtcacaccaagaggactgtgcagagatgaggaagacacctcttttgaatcactttctaaattcaatgtcaagtttccacctatggacaatgactcaactttcttacatagcactccagagagacccggcatccttagtcctgccacgtctgaggcagtgtgccaagagaaatttaatatggagttcagagacaacccagggaactttgttaaaacagaagaaactttatttgaaattcagggaattgaccccatagcttcagctatacaaaaccttaaaacaactgacaaaacaaagccctcaaatctcgtaaacacttgtatcaggacaactctggatagagctgcgtgtttgccacctggagaccataatgcattatatgtaaatagcttcccacttctggacccatctgatgcaccttttccctcactcgattccccgggaaaagcaatccgaggaccacagcagcccatttggaagccctttcctaatcaagacagtgactcggtggtactaagtggcacagactcagaactgcatatacctcgagtatgtgaattctgtcaagcagttttcccaccatccattacatccaggggggatttccttcggcatcttaattcacacttcaatggagagact

SEQ ID NO: 128 - DNA, 2136 bp, Homo sapiens
  TRIF/TICAM1
atggcctgcacaggcccatcacttcctagcgccttcgacattctaggtgcagcaggccaggacaagctcttgtatctgaagcacaaactgaagaccccacgcccaggctgccaggggcaggacctcctgcatgccatggttctcctgaagctgggccaggaaactgaggccaggatctctctagaggcattgaaggccgatgcggtggcccggctggtggcccgccagtgggctggcgtggacagcaccgaggacccagaggagcccccagatgtgtcctgggctgtggcccgcttgtaccacctgctggctgaggagaagctgtgccccgcctcgctgcgggacgtggcctaccaggaagccgtccgcaccctcagctccagggacgaccaccggctgggggaacttcaggatgaggcccgaaaccggtgtgggtgggacattgctggggatccagggagcatccggacgctccagtccaatctgggctgcctcccaccatcctcggctttgccctctgggaccaggagcctcccacgccccattgacggtgtttcggactggagccaagggtgctccctgcgatccactggcagccctgcctccctggccagcaacttggaaatcagccagtcccctaccatgcccttcctcagcctgcaccgcagcccacatgggcccagcaagctctgtgacgacccccaggccagcttggtgcccgagcctgtccccggtggctgccaggagcctgaggagatgagctggccgccatcgggggagattgccagcccaccagagctgccaagcagcccacctcctgggcttcccgaagtggccccagatgcaacctccactggcctccctgatacccccgcagctccagaaaccagcaccaactacccagtggagtgcaccgaggggtctgcaggcccccagtctctccccttgcctattctggagccggtcaaaaacccctgctctgtcaaagaccagacgccactccaactttctgtagaagataccacctctccaaataccaagccgtgcccacctactcccaccaccccagaaacatcccctcctcctcctcctcctcctccttcatctactccttgttcagctcacctgaccccctcctccctgttcccttcctccctggaatcatcatcggaacagaaattctataactttgtgatcctccacgccagggcagacgaacacatcgccctgcgggttcgggagaagctggaggcccttggcgtgcccgacggggccaccttctgcgaggatttccaggtgccggggcgcggggagctgagctgcctgcaggacgccatagaccactcagctttcatcatcctacttctcacctccaacttcgactgtcgcctgagcctgcaccaggtgaaccaagccatgatgagcaacctcacgcgacaggggtcgccagactgtgtcatccccttcctgcccctggagagctccccggcccagctcagctccgacacggccagcctgctctccgggctggtgcggctggacgaacactcccagatcttcgccaggaaggtggccaacaccttcaagccccacaggcttcaggcccgaaaggccatgtggaggaaggaacaggacacccgagccctgcgggaacagagccaacacctggacggtgagcggatgcaggcggcggcactgaacgcagcctactcagcctacctccagagctacttgtcctaccaggcacagatggagcagctccaggtggcttttgggagccacatgtcatttgggactggggcgccctatggggctcgaatgccctttgggggccaggtgcccctgggagccccgccaccctttcccacttggccggggtgcccgcagccgccacccctgcacgcatggcaggctggcacccccccaccgccctccccacagccagcagcctttccacagtcactgcccttcccgcagtccccagccttccctacggcctcacccgcaccccctcagagcccagggctgcaacccctcattatccaccacgcacagatggtacagctggggctgaacaaccacatgtggaaccagagagggtcccaggcgcccgaggacaagacgcaggaggcagaa

SEQ ID NO: 129 - DNA, 381 bp, Homo sapiens
  Batf3
atgtcgcaagggctcccggccgccggcagcgtcctgcagaggagcgtcgcggcgcccgggaaccagccgcagccgcagccgcagcagcagagccctgaggatgatgacaggaaggtccgaaggagagaaaaaaaccgagttgctgctcagagaagtcggaagaagcagacccagaaggctgacaagctccatgaggaatatgagagcctggagcaagaaaacaccatgctgcggagagagatcgggaagctgacagaggagctgaagcacctgacagaggcactgaaggagcacgagaagatgtgcccgctgctgctctgccctatgaactttgtgccagtgcctccccggccggaccctgtggccggctgcttgccccga

SEQ ID NO: 130 - DNA, 459 bp, Homo sapiens
  IL-4, isoform 1
atgggtctcacctcccaactgcttccccctctgttcttcctgctagcatgtgccggcaactttgtccacggacacaagtgcgatatcaccttacaggagatcatcaaaactttgaacagcctcacagagcagaagactctgtgcaccgagttgaccgtaacagacatctttgctgcctccaagaacacaactgagaaggaaaccttctgcagggctgcgactgtgctccggcagttctacagccaccatgagaaggacactcgctgcctgggtgcgactgcacagcagttccacaggcacaagcagctgatccgattcctgaaacggctcgacaggaacctctggggcctggcgggcttgaattcctgtcctgtgaaggaagccaaccagagtacgttggaaaacttcttggaaaggctaaagacgatcatgagagagaaatattcaaagtgttcgagc

SEQ ID NO: 131 - DNA, 534 bp, Homo sapiens
  IL-10
atgcacagctcagcactgctctgttgcctggtcctcctgactggggtgagggccagcccaggccagggcacccagtctgagaacagctgcacccacttcccaggcaacctgcctaacatgcttcgagatctccgagatgccttcagcagagtgaagactttctttcaaatgaaggatcagctggacaacttgttgttaaaggagtccttgctggaggactttaagggttacctgggttgccaagccttgtctgagatgatccagttttacctggaggaggtgatgccccaagctgagaaccaagacccagacatcaaggcgcatgtgaactccctgggggagaacctgaagaccctcaggctgaggctacggcgctgtcatcgatttcttccctgtgaaaacaagagcaaggccgtggagcaggtgaagaatgcctttaataagctccaagagaaaggcatctacaaagccatgagtgagtttgacatcttcatcaactacatagaagcctacatgacaatgaagatacgaaac

SEQ ID NO: 132 - DNA, 759 bp, Homo sapiens
  IL-12 alpha
atgtggccccctgggtcagcctcccagccaccgccctcacctgccgcggccacaggtctgcatccagcggctcgccctgtgtccctgcagtgccggctcagcatgtgtccagcgcgcagcctcctccttgtggctaccctggtcctcctggaccacctcagtttggccagaaacctccccgtggccactccagacccaggaatgttcccatgccttcaccactcccaaaacctgctgagggccgtcagcaacatgctccagaaggccagacaaactctagaattttacccttgcacttctgaagagattgatcatgaagatatcacaaaagataaaaccagcacagtggaggcctgtttaccattggaattaaccaagaatgagagttgcctaaattccagagagacctctttcataactaatgggagttgcctggcctccagaaagacctcttttatgatggccctgtgccttagtagtatttatgaagacttgaagatgtaccaggtggagttcaagaccatgaatgcaaagcttctgatggatcctaagaggcagatctttctagatcaaaacatgctggcagttattgatgagctgatgcaggccctgaatttcaacagtgagactgtgccacaaaaatcctcccttgaagaaccggatttttataaaactaaaatcaagctctgcatacttcttcatgctttcagaattcgggcagtgactattgatagagtgatgagctatctgaatgcttcc

SEQ ID NO: 133 - DNA, 986 bp, Homo sapiens
  IL-12 beta
agatgtgtcaccagcagttggtcatctcttggttttccctggtttttctggcatctcccctcgtggccatatgggaactgaagaaagatgtttatgtcgtagaattggattggtatccggatgcccctggagaaatggtggtcctcacctgtgacacccctgaagaagatggtatcacctggaccttggaccagagcagtgaggtcttaggctctggcaaaaccctgaccatccaagtcaaagagtttggagatgctggccagtacacctgtcacaaaggaggcgaggttctaagccattcgctcctgctgcttcacaaaaaggaagatggaatttggtccactgatattttaaaggaccagaaagaacccaaaaataagacctttctaagatgcgaggccaagaattattctggacgtttcacctgctggtggctgacgacaatcagtactgatttgacattcagtgtcaaaagcagcagaggctcttctgacccccaaggggtgacgtgcggagctgctacactctctgcagagagagtcagaggggacaacaaggagtatgagtactcagtggagtgccaggaggacagtgcctgcccagctgctgaggagagtctgcccattgaggtcatggtggatgccgttcacaagctcaagtatgaaaactacaccagcagcttcttcatcagggacatcatcaaacctgacccacccaagaacttgcagctgaagccattaaagaattctcggcaggtggaggtcagctgggagtaccctgacacctggagtactccacattcctacttctccctgacattctgcgttcaggtccagggcaagagcaagagagaaaagaaagatagagtcttcacggacaagacctcagccacggtcatctgccgcaaaaatgccagcattagcgtgcgggcccaggaccgctactatagctcatcttggagcgaatgggcatctgtgccctgcagt

SEQ ID NO: 134 - DNA, 276 bp, Homo sapiens
  MIP-1 alpha/ CCL3
atgcaggtctccactgctgcccttgctgtcctcctctgcaccatggctctctgcaaccagttctctgcatcacttgctgctgacacgccgaccgcctgctgcttcagctacacctcccggcagattccacagaatttcatagctgactactttgagacgagcagccagtgctccaagcccggtgtcatcttcctaaccaagcgaagccggcaggtctgtgctgaccccagtgaggagtgggtccagaaatatgtcagcgacctggagctgagtgcc

SEQ ID NO: 135 - DNA, 1530 bp, Homo sapiens
  CD39/ENTPD1, isoform 1
atggaagatacaaaggagtctaacgtgaagacattttgctccaagaatatcctagccatccttggcttctcctctatcatagctgtgatagctttgcttgctgtggggttgacccagaacaaagcattgccagaaaacgttaagtatgggattgtgctggatgcgggttcttctcacacaagtttatacatctataagtggccagcagaaaaggagaatgacacaggcgtggtgcatcaagtagaagaatgcagggttaaaggtcctggaatctcaaaatttgttcagaaagtaaatgaaataggcatttacctgactgattgcatggaaagagctagggaagtgattccaaggtcccagcaccaagagacacccgtttacctgggagccacggcaggcatgcggttgctcaggatggaaagtgaagagttggcagacagggttctggatgtggtggagaggagcctcagcaactacccctttgacttccagggtgccaggatcattactggccaagaggaaggtgcctatggctggattactatcaactatctgctgggcaaattcagtcagaaaacaaggtggttcagcatagtcccatatgaaaccaataatcaggaaacctttggagctttggaccttgggggagcctctacacaagtcacttttgtaccccaaaaccagactatcgagtccccagataatgctctgcaatttcgcctctatggcaaggactacaatgtctacacacatagcttcttgtgctatgggaaggatcaggcactctggcagaaactggccaaggacattcaggttgcaagtaatgaaattctcagggacccatgctttcatcctggatataagaaggtagtgaacgtaagtgacctttacaagaccccctgcaccaagagatttgagatgactcttccattccagcagtttgaaatccagggtattggaaactatcaacaatgccatcaaagcatcctggagctcttcaacaccagttactgcccttactcccagtgtgccttcaatgggattttcttgccaccactccagggggattttggggcattttcagctttttactttgtgatgaagtttttaaacttgacatcagagaaagtctctcaggaaaaggtgactgagatgatgaaaaagttctgtgctcagccttgggaggagataaaaacatcttacgctggagtaaaggagaagtacctgagtgaatactgcttttctggtacctacattctctccctccttctgcaaggctatcatttcacagctgattcctgggagcacatccatttcattggcaagatccagggcagcgacgccggctggactttgggctacatgctgaacctgaccaacatgatcccagctgagcaaccattgtccacacctctctcccactccacctatgtcttcctcatggttctattctccctggtccttttcacagtggccatcataggcttgcttatctttcacaagccttcatatttctggaaagatatggta

SEQ ID NO: 136 - DNA, 1722 bp, Homo sapiens
  CD73/NT5E, isoform 1
atgtgtccccgagccgcgcgggcgcccgcgacgctactcctcgccctgggcgcggtgctgtggcctgcggctggcgcctgggagcttacgattttgcacaccaacgacgtgcacagccggctggagcagaccagcgaggactccagcaagtgcgtcaacgccagccgctgcatgggtggcgtggctcggctcttcaccaaggttcagcagatccgccgcgccgaacccaacgtgctgctgctggacgccggcgaccagtaccagggcactatctggttcaccgtgtacaagggcgccgaggtggcgcacttcatgaacgccctgcgctacgatgccatggcactgggaaatcatgaatttgataatggtgtggaaggactgatcgagccactcctcaaagaggccaaatttccaattctgagtgcaaacattaaagcaaaggggccactagcatctcaaatatcaggactttatttgccatataaagttcttcctgttggtgatgaagttgtgggaatcgttggatacacttccaaagaaaccccttttctctcaaatccagggacaaatttagtgtttgaagatgaaatcactgcattacaacctgaagtagataagttaaaaactctaaatgtgaacaaaattattgcactgggacattcgggttttgaaatggataaactcatcgctcagaaagtgaggggtgtggacgtcgtggtgggaggacactccaacacatttctttacacaggcaatccaccttccaaagaggtgcctgctgggaagtacccattcatagtcacttctgatgatgggcggaaggttcctgtagtccaggcctatgcttttggcaaatacctaggctatctgaagatcgagtttgatgaaagaggaaacgtcatctcttcccatggaaatcccattcttctaaacagcagcattcctgaagatccaagcataaaagcagacattaacaaatggaggataaaattggataattattctacccaggaattagggaaaacaattgtctatctggatggctcctctcaatcatgccgctttagagaatgcaacatgggcaacctgatttgtgatgcaatgattaacaacaacctgagacacacggatgaaatgttctggaaccacgtatccatgtgcattttaaatggaggtggtatccggtcgcccattgatgaacgcaacaatggcacaattacctgggagaacctggctgctgtattgccctttggaggcacatttgacctagtccagttaaaaggttccaccctgaagaaggcctttgagcatagcgtgcaccgctacggccagtccactggagagttcctgcaggtgggcggaatccatgtggtgtatgatctttcccgaaaacctggagacagagtagtcaaattagatgttctttgcaccaagtgtcgagtgcccagttatgaccctctcaaaatggacgaggtatataaggtgatcctcccaaacttcctggccaatggtggagatgggttccagatgataaaagatgaattattaagacatgactctggtgaccaagatatcaacgtggtttctacatatatctccaaaatgaaagtaatttatccagcagttgaaggtcggatcaagttttccacaggaagtcactgccatggaagcttttctttaatatttctttcactttgggcagtgatctttgttttataccaa

SEQ ID NO: 137 - DNA, 297 bp, Homo sapiens
  IL-8 (CXCL8)
atgacttccaagctggccgtggctctcttggcagccttcctgatttctgcagctctgtgtgaaggtgcagttttgccaaggagtgctaaagaacttagatgtcagtgcataaagacatactccaaacctttccaccccaaatttatcaaagaactgagagtgattgagagtggaccacactgcgccaacacagaaattattgtaaagctttctgatggaagagagctctgtctggaccccaaggaaaactgggtgcagagggttgtggagaagtttttgaagagggctgagaattca

SEQ ID NO: 138 - DNA, 1596 bp, Homo sapiens
  ICAM1
atggctcccagcagcccccggcccgcgctgcccgcactcctggtcctgctcggggctctgttcccaggacctggcaatgcccagacatctgtgtccccctcaaaagtcatcctgccccggggaggctccgtgctggtgacatgcagcacctcctgtgaccagcccaagttgttgggcatagagaccccgttgcctaaaaaggagttgctcctgcctgggaacaaccggaaggtgtatgaactgagcaatgtgcaagaagatagccaaccaatgtgctattcaaactgccctgatgggcagtcaacagctaaaaccttcctcaccgtgtactggactccagaacgggtggaactggcacccctcccctcttggcagccagtgggcaagaaccttaccctacgctgccaggtggagggtggggcaccccgggccaacctcaccgtggtgctgctccgtggggagaaggagctgaaacgggagccagctgtgggggagcccgctgaggtcacgaccacggtgctggtgaggagagatcaccatggagccaatttctcgtgccgcactgaactggacctgcggccccaagggctggagctgtttgagaacacctcggccccctaccagctccagacctttgtcctgccagcgactcccccacaacttgtcagcccccgggtcctagaggtggacacgcaggggaccgtggtctgttccctggacgggctgttcccagtctcggaggcccaggtccacctggcactgggggaccagaggttgaaccccacagtcacctatggcaacgactccttctcggccaaggcctcagtcagtgtgaccgcagaggacgagggcacccagcggctgacgtgtgcagtaatactggggaaccagagccaggagacactgcagacagtgaccatctacagctttccggcgcccaacgtgattctgacgaagccagaggtctcagaagggaccgaggtgacagtgaagtgtgaggcccaccctagagccaaggtgacgctgaatggggttccagcccagccactgggcccgagggcccagctcctgctgaaggccaccccagaggacaacgggcgcagcttctcctgctctgcaaccctggaggtggccggccagcttatacacaagaaccagacccgggagcttcgtgtcctgtatggcccccgactggacgagagggattgtccgggaaactggacgtggccagaaaattcccagcagactccaatgtgccaggcttgggggaacccattgcccgagctcaagtgtctaaaggatggcactttcccactgcccatcggggaatcagtgactgtcactcgagatcttgagggcacctacctctgtcgggccaggagcactcaaggggaggtcacccgcaaggtgaccgtgaatgtgctctccccccggtatgagattgtcatcatcactgtggtagcagccgcagtcataatgggcactgcaggcctcagcacgtacctctataaccgccagcggaagatcaagaaatacagactacaacaggcccaaaaagggacccccatgaaaccgaacacacaagccacgcctccc

SEQ ID NO: 139 - DNA, 1488 bp, Homo sapiens
  angiopoietin 2, isoform 1
atgtggcagattgttttctttactctgagctgtgatcttgtcttggccgcagcctataacaactttcggaagagcatggacagcataggaaagaagcaatatcaggtccagcatgggtcctgcagctacactttcctcctgccagagatggacaactgccgctcttcctccagcccctacgtgtccaatgctgtgcagagggacgcgccgctcgaatacgatgactcggtgcagaggctgcaagtgctggagaacatcatggaaaacaacactcagtggctaatgaagcttgagaattatatccaggacaacatgaagaaagaaatggtagagatacagcagaatgcagtacagaaccagacggctgtgatgatagaaatagggacaaacctgttgaaccaaacagcggagcaaacgcggaagttaactgatgtggaagcccaagtattaaatcagaccacgagacttgaacttcagctcttggaacactccctctcgacaaacaaattggaaaaacagattttggaccagaccagtgaaataaacaaattgcaagataagaacagtttcctagaaaagaaggtgctagctatggaagacaagcacatcatccaactacagtcaataaaagaagagaaagatcagctacaggtgttagtatccaagcaaaattccatcattgaagaactagaaaaaaaaatagtgactgccacggtgaataattcagttcttcagaagcagcaacatgatctcatggagacagttaataacttactgactatgatgtccacatcaaactcagctaaggaccccactgttgctaaagaagaacaaatcagcttcagagactgtgctgaagtattcaaatcaggacacaccacgaatggcatctacacgttaacattccctaattctacagaagagatcaaggcctactgtgacatggaagctggaggaggcgggtggacaattattcagcgacgtgaggatggcagcgttgattttcagaggacttggaaagaatataaagtgggatttggtaacccttcaggagaatattggctgggaaatgagtttgtttcgcaactgactaatcagcaacgctatgtgcttaaaatacaccttaaagactgggaagggaatgaggcttactcattgtatgaacatttctatctctcaagtgaagaactcaattataggattcaccttaaaggacttacagggacagccggcaaaataagcagcatcagccaaccaggaaatgattttagcacaaaggatggagacaacgacaaatgtatttgcaaatgttcacaaatgctaacaggaggctggtggtttgatgcatgtggtccttccaacttgaacggaatgtactatccacagaggcagaacacaaataagttcaacggcattaaatggtactactggaaaggctcaggctattcgctcaaggccacaaccatgatgatccgaccagcagatttc

SEQ ID NO: 140 - DNA, 2766 bp, Homo sapiens
  NLRP3, isoform 2
atgaagatggcaagcacccgctgcaagctggccaggtacctggaggacctggaggatgtggacttgaagaaatttaagatgcacttagaggactatcctccccagaagggctgcatccccctcccgaggggtcagacagagaaggcagaccatgtggatctagccacgctaatgatcgacttcaatggggaggagaaggcgtgggccatggccgtgtggatcttcgctgcgatcaacaggagagacctttatgagaaagcaaaaagagatgagccgaagtggggttcagataatgcacgtgtttcgaatcccactgtgatatgccaggaagacagcattgaagaggagtggatgggtttactggagtacctttcgagaatctctatttgtaaaatgaagaaagattaccgtaagaagtacagaaagtacgtgagaagcagattccagtgcattgaagacaggaatgcccgtctgggtgagagtgtgagcctcaacaaacgctacacacgactgcgtctcatcaaggagcaccggagccagcaggagagggagcaggagcttctggccatcggcaagaccaagacgtgtgagagccccgtgagtcccattaagatggagttgctgtttgaccccgatgatgagcattctgagcctgtgcacaccgtggtgttccagggggcggcagggattgggaaaacaatcctggccaggaagatgatgttggactgggcgtcggggacactctaccaagacaggtttgactatctgttctatatccactgtcgggaggtgagccttgtgacacagaggagcctgggggacctgatcatgagctgctgccccgacccaaacccacccatccacaagatcgtgagaaaaccctccagaatcctcttcctcatggacggcttcgatgagctgcaaggtgcctttgacgagcacataggaccgctctgcactgactggcagaaggccgagcggggagacattctcctgagcagcctcatcagaaagaagctgcttcccgaggcctctctgctcatcaccacgagacctgtggccctggagaaactgcagcacttgctggaccatcctcggcatgtggagatcctgggtttctccgaggccaaaaggaaagagtacttcttcaagtacttctctgatgaggcccaagccagggcagccttcagtctgattcaggagaacgaggtcctcttcaccatgtgcttcatccccctggtctgctggatcgtgtgcactggactgaaacagcagatggagagtggcaagagccttgcccagacatccaagaccaccaccgcggtgtacgtcttcttcctttccagtttgctgcagccccggggagggagccaggagcacggcctctgcgcccacctctgggggctctgctctttggctgcagatggaatctggaaccagaaaatcctgtttgaggagtccgacctcaggaatcatggactgcagaaggcggatgtgtctgctttcctgaggatgaacctgttccaaaaggaagtggactgcgagaagttctacagcttcatccacatgactttccaggagttctttgccgccatgtactacctgctggaagaggaaaaggaaggaaggacgaacgttccagggagtcgtttgaagcttcccagccgagacgtgacagtccttctggaaaactatggcaaattcgaaaaggggtatttgatttttgttgtacgtttcctctttggcctggtaaaccaggagaggacctcctacttggagaagaaattaagttgcaagatctctcagcaaatcaggctggagctgctgaaatggattgaagtgaaagccaaagctaaaaagctgcagatccagcccagccagctggaattgttctactgtttgtacgagatgcaggaggaggacttcgtgcaaagggccatggactatttccccaagattgagatcaatctctccaccagaatggaccacatggtttcttccttttgcattgagaactgtcatcgggtggagtcactgtccctggggtttctccataacatgcccaaggaggaagaggaggaggaaaaggaaggccgacaccttgatatggtgcagtgtgtcctcccaagctcctctcatgctgcctgttctcatgggttggggcgctgtggcctctcgcatgagtgctgcttcgacatctccttggtcctcagcagcaaccagaagctggtggagctggacctgagtgacaacgccctcggtgacttcggaatcagacttctgtgtgtgggactgaagcacctgttgtgcaatctgaagaagctctggttggtgaattctggccttacgtcagtctgttgttcagctttgtcctcggtactcagcactaatcagaatctcacgcacctttacctgcgaggcaacactctcggagacaaggggatcaaactactctgtgagggactcttgcaccccgactgcaagcttcaggtgttggaattagacaactgcaacctcacgtcacactgctgctgggatctttccacacttctgacctccagccagagcctgcgaaagctgagcctgggcaacaatgacctgggcgacctgggggtcatgatgttctgtgaagtgctgaaacagcagagctgcctcctgcagaacctggggttgtctgaaatgtatttcaattatgagacaaaaagtgcgttagaaacacttcaagaagaaaagcctgagctgaccgtcgtctttgagccttcttgg

SEQ ID NO: 141 - DNA, 831 bp, Homo sapiens
  CD40, isoform 1
atggttcgtctgcctctgcagtgcgtcctctggggctgcttgctgaccgctgtccatccagaaccacccactgcatgcagagaaaaacagtacctaataaacagtcagtgctgttctttgtgccagccaggacagaaactggtgagtgactgcacagagttcactgaaacggaatgccttccttgcggtgaaagcgaattcctagacacctggaacagagagacacactgccaccagcacaaatactgcgaccccaacctagggcttcgggtccagcagaagggcacctcagaaacagacaccatctgcacctgtgaagaaggctggcactgtacgagtgaggcctgtgagagctgtgtcctgcaccgctcatgctcgcccggctttggggtcaagcagattgctacaggggtttctgataccatctgcgagccctgcccagtcggcttcttctccaatgtgtcatctgctttcgaaaaatgtcacccttggacaagctgtgagaccaaagacctggttgtgcaacaggcaggcacaaacaagactgatgttgtctgtggtccccaggatcggctgagagccctggtggtgatccccatcatcttcgggatcctgtttgccatcctcttggtgctggtctttatcaaaaaggtggccaagaagccaaccaataaggccccccaccccaagcaggaaccccaggagatcaattttcccgacgatcttcctggctccaacactgctgctccagtgcaggagactttacatggatgccaaccggtcacccaggaggatggcaaagagagtcgcatctcagtgcaggagagacag

SEQ ID NO: 142 - DNA, 783 bp, Homo sapiens
  CD40 ligand (CD40L)
atgatcgaaacatacaaccaaacttctccccgatctgcggccactggactgcccatcagcatgaaaatttttatgtatttacttactgtttttcttatcacccagatgattgggtcagcactttttgctgtgtatcttcatagaaggttggacaagatagaagatgaaaggaatcttcatgaagattttgtattcatgaaaacgatacagagatgcaacacaggagaaagatccttatccttactgaactgtgaggagattaaaagccagtttgaaggctttgtgaaggatataatgttaaacaaagaggagacgaagaaagaaaacagctttgaaatgcaaaaaggtgatcagaatcctcaaattgcggcacatgtcataagtgaggccagcagtaaaacaacatctgtgttacagtgggctgaaaaaggatactacaccatgagcaacaacttggtaaccctggaaaatgggaaacagctgaccgttaaaagacaaggactctattatatctatgcccaagtcaccttctgttccaatcgggaagcttcgagtcaagctccatttatagccagcctctgcctaaagtcccccggtagattcgagagaatcttactcagagctgcaaatacccacagttccgccaaaccttgcgggcaacaatccattcacttgggaggagtatttgaattgcaaccaggtgcttcggtgtttgtcaatgtgactgatccaagccaagtgagccatggcactggcttcacgtcctttggcttactcaaactc

SEQ ID NO: 143 - DNA, 579 bp, Homo sapiens
  CD-70 antigen, isoform 1
atgccggaggagggttcgggctgctcggtgcggcgcaggccctatgggtgcgtcctgcgggctgctttggtcccattggtcgcgggcttggtgatctgcctcgtggtgtgcatccagcgcttcgcacaggctcagcagcagctgccgctcgagtcacttgggtgggacgtagctgagctgcagctgaatcacacaggacctcagcaggaccccaggctatactggcaggggggcccagcactgggccgctccttcctgcatggaccagagctggacaaggggcagctacgtatccatcgtgatggcatctacatggtacacatccaggtgacgctggccatctgctcctccacgacggcctccaggcaccaccccaccaccctggccgtgggaatctgctctcccgcctcccgtagcatcagcctgctgcgtctcagcttccaccaaggttgtaccattgcctcccagcgcctgacgcccctggcccgaggggacacactctgcaccaacctcactgggacacttttgccttcccgaaacactgatgagaccttctttggagtgcagtgggtgcgcccc

SEQ ID NO: 144 - DNA, 765 bp, Homo sapiens
  CD137 (4-1BB, TNFRSF9)
atgggaaacagctgttacaacatagtagccactctgttgctggtcctcaactttgagaggacaagatcattgcaggatccttgtagtaactgcccagctggtacattctgtgataataacaggaatcagatttgcagtccctgtcctccaaatagtttctccagcgcaggtggacaaaggacctgtgacatatgcaggcagtgtaaaggtgttttcaggaccaggaaggagtgttcctccaccagcaatgcagagtgtgactgcactccagggtttcactgcctgggggcaggatgcagcatgtgtgaacaggattgtaaacaaggtcaagaactgacaaaaaaaggttgtaaagactgttgctttgggacatttaacgatcagaaacgtggcatctgtcgaccctggacaaactgttctttggatggaaagtctgtgcttgtgaatgggacgaaggagagggacgtggtctgtggaccatctccagccgacctctctccgggagcatcctctgtgaccccgcctgcccctgcgagagagccaggacactctccgcagatcatctccttctttcttgcgctgacgtcgactgcgttgctcttcctgctgttcttcctcacgctccgtttctctgttgttaaacggggcagaaagaaactcctgtatatattcaaacaaccatttatgagaccagtacaaactactcaagaggaagatggctgtagctgccgatttccagaagaagaagaaggaggatgtgaactg

SEQ ID NO: 145 - DNA, 807 bp, Homo sapiens
  CD200, isoform 1
atggagaggctggtgatcaggatgcccttctctcatctgtctacctacagcctggtttgggtcatggcagcagtggtgctgtgcacagcacaagtgcaagtggtgacccaggatgaaagagagcagctgtacacacctgcttccttaaaatgctctctgcaaaatgcccaggaagccctcattgtgacatggcagaaaaagaaagctgtaagcccagaaaacatggtcaccttcagcgagaaccatggggtggtgatccagcctgcctataaggacaagataaacattacccagctgggactccaaaactcaaccatcaccttctggaatatcaccctggaggatgaagggtgttacatgtgtctcttcaatacctttggttttgggaagatctcaggaacggcctgcctcaccgtctatgtacagcccatagtatcccttcactacaaattctctgaagaccacctaaatatcacttgctctgccactgcccgcccagcccccatggtcttctggaaggtccctcggtcagggattgaaaatagtacagtgactctgtctcacccaaatgggaccacgtctgttaccagcatcctccatatcaaagaccctaagaatcaggtggggaaggaggtgatctgccaggtgctgcacctggggactgtgaccgactttaagcaaaccgtcaacaaaggctattggttttcagttccgctattgctaagcattgtttccctggtaattcttctcgtcctaatctcaatcttactgtactggaaacgtcaccggaatcaggaccgagagccc

SEQ ID NO: 146 - DNA, 1236 bp, Homo sapiens
  A2aR (ADORA2A)
atgcccatcatgggctcctcggtgtacatcacggtggagctggccattgctgtgctggccatcctgggcaatgtgctggtgtgctgggccgtgtggctcaacagcaacctgcagaacgtcaccaactactttgtggtgtcactggcggcggccgacatcgcagtgggtgtgctcgccatcccctttgccatcaccatcagcaccgggttctgcgctgcctgccacggctgcctcttcattgcctgcttcgtcctggtcctcacgcagagctccatcttcagtctcctggccatcgccattgaccgctacattgccatccgcatcccgctccggtacaatggcttggtgaccggcacgagggctaagggcatcattgccatctgctgggtgctgtcgtttgccatcggcctgactcccatgctaggttggaacaactgcggtcagccaaaggagggcaagaaccactcccagggctgcggggagggccaagtggcctgtctctttgaggatgtggtccccatgaactacatggtgtacttcaacttctttgcctgtgtgctggtgcccctgctgctcatgctgggtgtctatttgcggatcttcctggcggcgcgacgacagctgaagcagatggagagccagcctctgccgggggagcgggcacggtccacactgcagaaggaggtccatgctgccaagtcactggccatcattgtggggctctttgccctctgctggctgcccctacacatcatcaactgcttcactttcttctgccccgactgcagccacgcccctctctggctcatgtacctggccatcgtcctctcccacaccaattcggttgtgaatcccttcatctacgcctaccgtatccgcgagttccgccagaccttccgcaagatcattcgcagccacgtcctgaggcagcaagaacctttcaaggcagctggcaccagtgcccgggtcttggcagctcatggcagtgacggagagcaggtcagcctccgtctcaacggccacccgccaggagtgtgggccaacggcagtgctccccaccctgagcggaggcccaatggctatgccctggggctggtgagtggagggagtgcccaagagtcccaggggaacacgggcctcccagacgtggagctccttagccatgagctcaagggagtgtgcccagagccccctggcctagatgaccccctggcccaggatggagcaggagtgtcc

SEQ ID NO: 147 - DNA, 723 bp, Homo sapiens
  GITR/TNFRSF18, isoform 1
atggcacagcacggggcgatgggcgcgtttcgggccctgtgcggcctggcgctgctgtgcgcgctcagcctgggtcagcgccccaccgggggtcccgggtgcggccctgggcgcctcctgcttgggacgggaacggacgcgcgctgctgccgggttcacacgacgcgctgctgccgcgattacccgggcgaggagtgctgttccgagtgggactgcatgtgtgtccagcctgaattccactgcggagacccttgctgcacgacctgccggcaccacccttgtcccccaggccagggggtacagtcccaggggaaattcagttttggcttccagtgtatcgactgtgcctcggggaccttctccgggggccacgaaggccactgcaaaccttggacagactgcacccagttcgggtttctcactgtgttccctgggaacaagacccacaacgctgtgtgcgtcccagggtccccgccggcagagccgcttgggtggctgaccgtcgtcctcctggccgtggccgcctgcgtcctcctcctgacctcggcccagcttggactgcacatctggcagctgaggagtcagtgcatgtggccccgagagacccagctgctgctggaggtgccgccgtcgaccgaagacgccagaagctgccagttccccgaggaagagcggggcgagcgatcggcagaggagaaggggcggctgggagacctgtgggtg

SEQ ID NO: 148 - DNA, 1362 bp, Homo sapiens
  B7-H6 (NCR3LG1)
atgacgtggagggctgccgcctccacgtgcgcggcgctcctgattctgctgtgggcgctgacgaccgaaggtgatctgaaagtagagatgatggcaggggggactcagatcacacccctgaatgacaatgtcaccatattctgcaatatcttttattcccaacccctcaacatcacgtctatgggtatcacctggttttggaagagtctgacgtttgacaaagaagtcaaagtctttgaattttttggagatcaccaagaggcattccgacctggagccattgtgtctccatggaggctgaagagtggggacgcctcactgcggctgcctggaatccagctggaggaagcaggagagtaccgatgtgaggtggtggtcacccctctgaaggcacagggaacagtccagcttgaagttgtggcttccccagccagcagattgttgctggatcaagtgggcatgaaagagaatgaagacaaatatatgtgtgagtcaagtgggttctacccagaggctattaatataacatgggagaagcagacccagaagtttccccatcccatagagatttctgaggatgtcatcactggtcccaccatcaagaatatggatggcacatttaatgtcactagctgcttgaagctgaactcctctcaggaagaccctgggactgtctaccagtgtgtggtacggcatgcgtccttgcatacccccttgaggagcaactttaccctgactgctgctcggcacagtctttctgaaactgagaagacagataatttttccattcattggtggcctatttcattcattggtgttggactggttttattaattgttttgattccttggaaaaagatatgtaacaaatcatcttcagcctatactcctctcaagtgcattctgaaacactggaactcctttgacactcagactctgaagaaagagcacctcatattcttttgcactcgggcatggccgtcttaccagctgcaggatggggaggcttggcctcctgagggaagtgttaatattaatactattcaacaactagatgttttctgcagacaggagggcaaatggtccgaggttccttatgtgcaagccttctttgccttgcgagacaacccagatctttgtcagtgttgtagaattgaccctgctctcctaacagttacatcaggcaagtccatagatgataattccacaaagtctgagaaacaaacccctagggaacactcggatgcagttccggatgccccaatccttcctgtctcccctatctgggaacctcctccagccacaacatcaacaactccagttctatcctcccaacccccaactttactgttacccctacag

SEQ ID NO: 149 - DNA, 597 bp, Homo sapiens
  ICOS, isoform 1
atgaagtcaggcctctggtatttctttctcttctgcttgcgcattaaagttttaacaggagaaatcaatggttctgccaattatgagatgtttatatttcacaacggaggtgtacaaattttatgcaaatatcctgacattgtccagcaatttaaaatgcagttgctgaaaggggggcaaatactctgcgatctcactaagacaaaaggaagtggaaacacagtgtccattaagagtctgaaattctgccattctcagttatccaacaacagtgtctctttttttctatacaacttggaccattctcatgccaactattacttctgcaacctatcaatttttgatcctcctccttttaaagtaactcttacaggaggatatttgcatatttatgaatcacaactttgttgccagctgaagttctggttacccataggatgtgcagcctttgttgtagtctgcattttgggatgcatacttatttgttggcttacaaaaaagaagtattcatccagtgtgcacgaccctaacggtgaatacatgttcatgagagcagtgaacacagccaaaaaatctagactcacagatgtgacccta

SEQ ID NO: 150 - DNA, 906 bp, Homo sapiens
  ICOS ligand, isoform 1
atgcggctgggcagtcctggactgctcttcctgctcttcagcagccttcgagctgatactcaggagaaggaagtcagagcgatggtaggcagcgacgtggagctcagctgcgcttgccctgaaggaagccgttttgatttaaatgatgtttacgtatattggcaaaccagtgagtcgaaaaccgtggtgacctaccacatcccacagaacagctccttggaaaacgtggacagccgctaccggaaccgagccctgatgtcaccggccggcatgctgcggggcgacttctccctgcgcttgttcaacgtcaccccccaggacgagcagaagtttcactgcctggtgttgagccaatccctgggattccaggaggttttgagcgttgaggttacactgcatgtggcagcaaacttcagcgtgcccgtcgtcagcgccccccacagcccctcccaggatgagctcaccttcacgtgtacatccataaacggctaccccaggcccaacgtgtactggatcaataagacggacaacagcctgctggaccaggctctgcagaatgacaccgtcttcttgaacatgcggggcttgtatgacgtggtcagcgtgctgaggatcgcacggacccccagcgtgaacattggctgctgcatagagaacgtgcttctgcagcagaacctgactgtcggcagccagacaggaaatgacatcggagagagagacaagatcacagagaatccagtcagtaccggcgagaaaaacgcggccacgtggagcatcctggctgtcctgtgcctgcttgtggtcgtggcggtggccataggctgggtgtgcagggaccgatgcctccaacacagctatgcaggtgcctgggctgtgagtccggagacagagctcactggccacgtt

SEQ ID NO: 151 - DNA, 1344 bp, Homo sapiens
  gp49B/LILRB4, isoform 1
atgatccccaccttcacggctctgctctgcctcgggctgagtctgggccccaggacccacatgcaggcagggcccctccccaaacccaccctctgggctgagccaggctctgtgatcagctgggggaactctgtgaccatctggtgtcaggggaccctggaggctcgggagtaccgtctggataaagaggaaagcccagcaccctgggacagacagaacccactggagcccaagaacaaggccagattctccatcccatccatgacagaggactatgcagggagataccgctgttactatcgcagccctgtaggctggtcacagcccagtgaccccctggagctggtgatgacaggagcctacagtaaacccaccctttcagccctgccgagtcctcttgtgacctcaggaaagagcgtgaccctgctgtgtcagtcacggagcccaatggacacttttcttctgatcaaggagcgggcagcccatcccctactgcatctgagatcagagcacggagctcagcagcaccaggctgaattccccatgagtcctgtgacctcagtgcacggggggacctacaggtgcttcagctcacacggcttctcccactacctgctgtcacaccccagtgaccccctggagctcatagtctcaggatccttggagggtcccaggccctcacccacaaggtccgtctcaacagctgcaggccctgaggaccagcccctcatgcctacagggtcagtcccccacagtggtctgagaaggcactgggaggtactgatcggggtcttggtggtctccatcctgcttctctccctcctcctcttcctcctcctccaacactggcgtcagggaaaacacaggacattggcccagagacaggctgatttccaacgtcctccaggggctgccgagccagagcccaaggacgggggcctacagaggaggtccagcccagctgctgacgtccagggagaaaacttctgtgctgccgtgaagaacacacagcctgaggacggggtggaaatggacactcggcagagcccacacgatgaagacccccaggcagtgacgtatgccaaggtgaaacactccagacctaggagagaaatggcctctcctccctccccactgtctggggaattcctggacacaaaggacagacaggcagaagaggacagacagatggacactgaggctgctgcatctgaagccccccaggatgtgacctacgcccggctgcacagctttaccctcagacagaaggcaactgagcctcctccatcccaggaaggggcctctccagctgagcccagtgtctatgccactctggccatccac

SEQ ID NO: 152 - DNA, 1896 bp, Homo sapiens
  PIR-B/LILRB3, isoform 1
atgacgcccgccctcacagccctgctctgccttgggctgagtctgggccccaggacccgcatgcaggcagggcccttccccaaacccaccctctgggctgagccaggctctgtgatcagctgggggagccccgtgaccatctggtgtcaggggagcctggaggcccaggagtaccaactggataaagagggaagcccagagccctgggacagaaataacccactggaacccaagaacaaggccagattctccatcccatccatgacacagcaccatgcagggagataccgctgccactattacagctctgcaggctggtcagagcccagcgaccccctggagctggtgatgacaggattctacaacaaacccaccctctcagccctgcccagccctgtggtggcctcaggggggaatatgaccctccgatgtggctcacagaagggatatcaccattttgttctgatgaaggaaggagaacaccagctcccccggaccctggactcacagcagctccacagtggggggttccaggccctgttccctgtgggccccgtgacccccagccacaggtggaggttcacatgctattactattatacaaacaccccctgggtgtggtcccaccccagtgaccccctggagattctgccctcaggcgtgtctaggaagccctccctcctgaccctgcagggccctgtcctggcccctgggcagagcctgaccctccagtgtggctctgatgtcggctacgacagatttgttctgtataaggagggggaacgtgacttcctccagcgccctggccagcagccccaggctgggctctcccaggccaacttcaccctgggccctgtgagccgctcctacgggggccagtacaggtgctatggtgcacacaacctctcctccgagtggtcggcccccagtgaccccctggacatcctgatcacaggacagatctatgacaccgtctccctgtcagcacagccgggccccacagtggcctcaggagagaacatgaccctgctgtgtcagtcacgggggtattttgacactttccttctgaccaaagaaggggcagcccatcccccactgcgtctgagatcaatgtacggagctcataagtaccaggctgaattccccatgagtcctgtgacctcagcccacgcggggacctacaggtgctacggctcacgcagctccaacccccacctgctgtctttccccagtgagcccctggaactcatggtctcaggacactctggaggctccagcctcccacccacagggccgccctccacacctggtctgggaagatacctggaggttttgattggggtctcggtggccttcgtcctgctgctcttcctcctcctcttcctcctcctcctccgtcagcgtcacagcaaacacaggacatctgaccagagaaagactgatttccagcgtcctgcaggggctgcggagacagagcccaaggacaggggcctgctgaggaggtccagcccagctgctgacgtccaggaagaaaacctctatgctgctgtgaaggacacacagtctgaggacagggtggagctggacagtcagcagagcccacacgatgaagacccccaggcagtgacgtatgccccggtgaaacactccagtcctaggagagaaatggcctctcctccctcctcactgtctggggaattcctggacacaaaggacagacaggtggaagaggacaggcagatggacactgaggctgctgcatctgaagcctcccaggatgtgacctacgcccagctgcacagcttgacccttagacggaaggcaactgagcctcctccatcccaggaaggggaacctccagctgagcccagcatctacgccactctggccatccac

SEQ ID NO: 153 - DNA, 1014 bp, Homo sapiens
  HLA-G alpha chain
atggtggtcatggcgccccgaaccctcttcctgctgctctcgggggccctgaccctgaccgagacctgggcgggctcccactccatgaggtatttcagcgccgccgtgtcccggcccggccgcggggagccccgcttcatcgccatgggctacgtggacgacacgcagttcgtgcggttcgacagcgactcggcgtgtccgaggatggagccgcgggcgccgtgggtggagcaggaggggccggagtattgggaagaggagacacggaacaccaaggcccacgcacagactgacagaatgaacctgcagaccctgcgcggctactacaaccagagcgaggccagttctcacaccctccagtggatgattggctgcgacctggggtccgacggacgcctcctccgcgggtatgaacagtatgcctacgatggcaaggattacctcgccctgaacgaggacctgcgctcctggaccgcagcggacactgcggctcagatctccaagcgcaagtgtgaggcggccaatgtggctgaacaaaggagagcctacctggagggcacgtgcgtggagtggctccacagatacctggagaacgggaaggagatgctgcagcgcgcggacccccccaagacacacgtgacccaccaccctgtctttgactatgaggccaccctgaggtgctgggccctgggcttctaccctgcggagatcatactgacctggcagcgggatggggaggaccagacccaggacgtggagctcgtggagaccaggcctgcaggggatggaaccttccagaagtgggcagctgtggtggtgccttctggagaggagcagagatacacgtgccatgtgcagcatgaggggctgccggagcccctcatgctgagatggaagcagtcttccctgcccaccatccccatcatgggtatcgttgctggcctggttgtccttgcagctgtagtcactggagctgcggtcgctgctgtgctgtggagaaagaagagctcagat

SEQ ID NO: 154 - DNA, 1092 bp, Homo sapiens
  TIM1/HAVCR1
atgcatcctcaagtggtcatcttaagcctcatcctacatctggcagattctgtagctggttctgtaaaggttggtggagaggcaggtccatctgtcacactaccctgccactacagtggagctgtcacatccatgtgctggaatagaggctcatgttctctattcacatgccaaaatggcattgtctggaccaatggaacccacgtcacctatcggaaggacacacgctataagctattgggggacctttcaagaagggatgtctctttgaccatagaaaatacagctgtgtctgacagtggcgtatattgttgccgtgttgagcaccgtgggtggttcaatgacatgaaaatcaccgtatcattggagattgtgccacccaaggtcacgactactccaattgtcacaactgttccaaccgtcacgactgttcgaacgagcaccactgttccaacgacaacgactgttccaatgacgactgttccaacgacaactgttccaacaacaatgagcattccaacgacaacgactgttctgacgacaatgactgtttcaacgacaacgagcgttccaacgacaacgagcattccaacaacaacaagtgttccagtgacaacaactgtctctacctttgttcctccaatgcctttgcccaggcagaaccatgaaccagtagccacttcaccatcttcacctcagccagcagaaacccaccctacgacactgcagggagcaataaggagagaacccaccagctcaccattgtactcttacacaacagatgggaatgacaccgtgacagagtcttcagatggcctttggaataacaatcaaactcaactgttcctagaacatagtctactgacggccaataccactaaaggaatctatgctggagtctgtatttctgtcttggtgcttcttgctcttttgggtgtcatcattgccaaaaagtatttcttcaaaaaggaggttcaacaactaagtgtttcatttagcagccttcaaattaaagctttgcaaaatgcagttgaaaaggaagtccaagcagaagacaatatctacattgagaatagtctttatgccacggac

SEQ ID NO: 155 - DNA, 1134 bp, Homo sapiens
  TIM4/TIMD4, isoform 1
atgtccaaagaacctctcattctctggctgatgattgagttttggtggctttacctgacaccagtcacttcagagactgttgtgacggaggttttgggtcaccgggtgactttgccctgtctgtactcatcctggtctcacaacagcaacagcatgtgctgggggaaagaccagtgcccctactccggttgcaaggaggcgctcatccgcactgatggaatgagggtgacctcaagaaagtcagcaaaatatagacttcaggggactatcccgagaggtgatgtctccttgaccatcttaaaccccagtgaaagtgacagcggtgtgtactgctgccgcatagaagtgcctggctggttcaacgatgtaaagataaacgtgcgcctgaatctacagagagcctcaacaaccacgcacagaacagcaaccaccaccacacgcagaacaacaacaacaagccccaccaccacccgacaaatgacaacaaccccagctgcacttccaacaacagtcgtgaccacacccgatctcacaaccggaacaccactccagatgacaaccattgccgtcttcacaacagcaaacacgtgcctttcactaaccccaagcacccttccggaggaagccacaggtcttctgactcccgagccttctaaggaagggcccatcctcactgcagaatcagaaactgtcctccccagtgattcctggagtagtgttgagtctacttctgctgacactgtcctgctgacatccaaagagtccaaagtttgggatctcccatcaacatcccacgtgtcaatgtggaaaacgagtgattctgtgtcttctcctcagcctggagcatctgatacagcagttcctgagcagaacaaaacaacaaaaacaggacagatggatggaatacccatgtcaatgaagaatgaaatgcccatctcccaactactgatgatcatcgccccctccttgggatttgtgctcttcgcattgtttgtggcgtttctcctgagagggaaactcatggaaacctattgttcgcagaaacacacaaggctagactacattggagatagtaaaaatgtcctcaatgacgtgcagcatggaagggaagacgaagacggcctttttaccctc

SEQ ID NO: 156 - DNA, 831 bp, Homo sapiens
  OX-40/CD134/TNFRSF4
atgtgcgtgggggctcggcggctgggccgcgggccgtgtgcggctctgctcctcctgggcctggggctgagcaccgtgacggggctccactgtgtcggggacacctaccccagcaacgaccggtgctgccacgagtgcaggccaggcaacgggatggtgagccgctgcagccgctcccagaacacggtgtgccgtccgtgcgggccgggcttctacaacgacgtggtcagctccaagccgtgcaagccctgcacgtggtgtaacctcagaagtgggagtgagcggaagcagctgtgcacggccacacaggacacagtctgccgctgccgggcgggcacccagcccctggacagctacaagcctggagttgactgtgccccctgccctccagggcacttctccccaggcgacaaccaggcctgcaagccctggaccaactgcaccttggctgggaagcacaccctgcagccggccagcaatagctcggacgcaatctgtgaggacagggaccccccagccacgcagccccaggagacccagggccccccggccaggcccatcactgtccagcccactgaagcctggcccagaacctcacagggaccctccacccggcccgtggaggtccccgggggccgtgcggttgccgccatcctgggcctgggcctggtgctggggctgctgggccccctggccatcctgctggccctgtacctgctccggagggaccagaggctgccccccgatgcccacaagccccctgggggaggcagtttccggacccccatccaagaggagcaggccgacgcccactccaccctggccaagatc

SEQ ID NO: 157 - DNA, 549 bp, Homo sapiens
  OX-40L/CD252/TNFSF4, isoform 1
atggaaagggtccaacccctggaagagaatgtgggaaatgcagccaggccaagattcgagaggaacaagctattgctggtggcctctgtaattcagggactggggctgctcctgtgcttcacctacatctgcctgcacttctctgctcttcaggtatcacatcggtatcctcgaattcaaagtatcaaagtacaatttaccgaatataagaaggagaaaggtttcatcctcacttcccaaaaggaggatgaaatcatgaaggtgcagaacaactcagtcatcatcaactgtgatgggttttatctcatctccctgaagggctacttctcccaggaagtcaacattagccttcattaccagaaggatgaggagcccctcttccaactgaagaaggtcaggtctgtcaactccttgatggtggcctctctgacttacaaagacaaagtctacttgaatgtgaccactgacaatacctccctggatgacttccatgtgaatggcggagaactgattcttatccatcaaaatcctggtgaattctgtgtcctt

SEQ ID NO: 158 - DNA, 1950 bp, Homo sapiens
  ILT-2/LILRB1, isoform 1
atgacccccatcctcacggtcctgatctgtctcgggctgagtctgggcccccggacccacgtgcaggcagggcacctccccaagcccaccctctgggctgaaccaggctctgtgatcacccaggggagtcctgtgaccctcaggtgtcaggggggccaggagacccaggagtaccgtctatatagagaaaagaaaacagcaccctggattacacggatcccacaggagcttgtgaagaagggccagttccccatcccatccatcacctgggaacacacagggcggtatcgctgttactatggtagcgacactgcaggccgctcagagagcagtgaccccctggagctggtggtgacaggagcctacatcaaacccaccctctcagcccagcccagccccgtggtgaactcaggagggaatgtaaccctccagtgtgactcacaggtggcatttgatggcttcattctgtgtaaggaaggagaagatgaacacccacaatgcctgaactcccagccccatgcccgtgggtcgtcccgcgccatcttctccgtgggccccgtgagcccgagtcgcaggtggtggtacaggtgctatgcttatgactcgaactctccctatgagtggtctctacccagtgatctcctggagctcctggtcctaggtgtttctaagaagccatcactctcagtgcagccaggtcctatcgtggcccctgaggagaccctgactctgcagtgtggctctgatgctggctacaacagatttgttctgtataaggacggggaacgtgacttccttcagctcgctggcgcacagccccaggctgggctctcccaggccaacttcaccctgggccctgtgagccgctcctacgggggccagtacagatgctacggtgcacacaacctctcctccgagtggtcggcccccagcgaccccctggacatcctgatcgcaggacagttctatgacagagtctccctctcggtgcagccgggccccacggtggcctcaggagagaacgtgaccctgctgtgtcagtcacagggatggatgcaaactttccttctgaccaaggagggggcagctgatgacccatggcgtctaagatcaacgtaccaatctcaaaaataccaggctgaattccccatgggtcctgtgacctcagcccatgcggggacctacaggtgctacggctcacagagctccaaaccctacctgctgactcaccccagtgaccccctggagctcgtggtctcaggaccgtctgggggccccagctccccgacaacaggccccacctccacatctggccctgaggaccagcccctcacccccaccgggtcggatccccagagtggtctgggaaggcacctgggggttgtgatcggcatcttggtggccgtcatcctactgctcctcctcctcctcctcctcttcctcatcctccgacatcgacgtcagggcaaacactggacatcgacccagagaaaggctgatttccaacatcctgcaggggctgtggggccagagcccacagacagaggcctgcagtggaggtccagcccagctgccgatgcccaggaagaaaacctctatgctgccgtgaagcacacacagcctgaggatggggtggagatggacactcggagcccacacgatgaagacccccaggcagtgacgtatgccgaggtgaaacactccagacctaggagagaaatggcctctcctccttccccactgtctggggaattcctggacacaaaggacagacaggcggaagaggacaggcagatggacactgaggctgctgcatctgaagccccccaggatgtgacctacgcccagctgcacagcttgaccctcagacgggaggcaactgagcctcctccatcccaggaagggccctctccagctgtgcccagcatctacgccactctggccatccac

SEQ ID NO: 159 - DNA, 1794 bp, Homo sapiens
  ILT-4/LILRB2, isoform 1
atgacccccatcgtcacagtcctgatctgtctcgggctgagtctgggccccaggacccgcgtgcagacagggaccatccccaagcccaccctgtgggctgagccagactctgtgatcacccaggggagtcccgtcaccctcagttgtcaggggagccttgaagcccaggagtaccgtctatatagggagaaaaaatcagcatcttggattacacggatacgaccagagcttgtgaagaacggccagttccacatcccatccatcacctgggaacacacagggcgatatggctgtcagtattacagccgcgctcggtggtctgagctcagtgaccccctggtgctggtgatgacaggagcctacccaaaacccaccctctcagcccagcccagccctgtggtgacctcaggaggaagggtgaccctccagtgtgagtcacaggtggcatttggcggcttcattctgtgtaaggaaggagaagatgaacacccacaatgcctgaactcccagccccatgcccgtgggtcgtcccgcgccatcttctccgtgggccccgtgagcccgaatcgcaggtggtcgcacaggtgctatggttatgacttgaactctccctatgtgtggtcttcacccagtgatctcctggagctcctggtcccaggtgtttctaagaagccatcactctcagtgcagccgggtcctgtcatggcccctggggaaagcctgaccctccagtgtgtctctgatgtcggctatgacagatttgttctgtacaaggagggggaacgtgaccttcgccagctccctggccggcagccccaggctgggctctcccaggccaacttcaccctgggccctgtgagccgctcctacgggggccagtacagatgctacggtgcacacaacctctcctctgagtgctcggcccccagcgaccccctggacatcctgatcacaggacagatccgtggcacacccttcatctcagtgcagccaggccccacagtggcctcaggagagaacgtgaccctgctgtgtcagtcatggcggcagttccacactttccttctgaccaaggcgggagcagctgatgccccactccgtctaagatcaatacacgaatatcctaagtaccaggctgaattccccatgagtcctgtgacctcagcccacgcggggacctacaggtgctacggctcactcaactccgacccctacctgctgtctcaccccagtgagcccctggagctcgtggtctcaggaccctccatgggttccagccccccacccaccggtcccatctccacacctgcaggccctgaggaccagcccctcacccccactgggtcggatccccaaagtggtctgggaaggcacctgggggttgtgatcggcatcttggtggccgtcgtcctactgctcctcctcctcctcctcctcttcctcatcctccgacatcgacgtcagggcaaacactggacatcgacccagagaaaggctgatttccaacatcctgcaggggctgtggggccagagcccacagacagaggcctgcagtggaggtccagcccagctgccgacgcccaggaagaaaacctctatgctgccgtgaaggacacacagcctgaagatggggtggagatggacactcgggctgctgcatctgaagccccccaggatgtgacctacgcccagctgcacagcttgaccctcagacggaaggcaactgagcctcctccatcccaggaaagggaacctccagctgagcccagcatctacgccaccctggccatccac

SEQ ID NO: 160 - DNA, 717 bp, Homo sapiens
  BCL-2 isoform alpha
atggcgcacgctgggagaacagggtacgataaccgggagatagtgatgaagtacatccattataagctgtcgcagaggggctacgagtgggatgcgggagatgtgggcgccgcgcccccgggggccgcccccgcaccgggcatcttctcctcccagcccgggcacacgccccatccagccgcatcccgggacccggtcgccaggacctcgccgctgcagaccccggctgcccccggcgccgccgcggggcctgcgctcagcccggtgccacctgtggtccacctgaccctccgccaggccggcgacgacttctcccgccgctaccgccgcgacttcgccgagatgtccagccagctgcacctgacgcccttcaccgcgcggggacgctttgccacggtggtggaggagctcttcagggacggggtgaactgggggaggattgtggccttctttgagttcggtggggtcatgtgtgtggagagcgtcaaccgggagatgtcgcccctggtggacaacatcgccctgtggatgactgagtacctgaaccggcacctgcacacctggatccaggataacggaggctgggatgcctttgtggaactgtacggccccagcatgcggcctctgtttgatttctcctggctgtctctgaagactctgctcagtttggccctggtgggagcttgcatcaccctgggtgcctatctgggccacaag

SEQ ID NO: 161 - DNA, 4050 bp, Homo sapiens
  MDR1/ABCB1, isoform 1
atgagtgtcaacttgcaaggggaccagagaggtgcaacggaagccagaacattcctcctggaaattcaacctgtttcgcagtttctcgaggaatcagcattcagtcaatccgggccgggagcagtcatctgtggtctttccactaaagtcggagtatcttcttccaaaatttcacgtcttggtggccgttccaaggagcgcgaggtcggaatggatcttgaaggggaccgcaatggaggagcaaagaagaagaacttttttaaactgaacaataaaagtgaaaaagataagaaggaaaagaaaccaactgtcagtgtattttcaatgtttcgctattcaaattggcttgacaagttgtatatggtggtgggaactttggctgccatcatccatggggctggacttcctctcatgatgctggtgtttggagaaatgacagatatctttgcaaatgcaggaaatttagaagatctgatgtcaaacatcactaatagaagtgatatcaatgatacagggttcttcatgaatctggaggaagacatgaccaggtatgcctattattacagtggaattggtgctggggtgctggttgctgcttacattcaggtttcattttggtgcctggcagctggaagacaaatacacaaaattagaaaacagttttttcatgctataatgcgacaggagataggctggtttgatgtgcacgatgttggggagcttaacacccgacttacagatgatgtctccaagattaatgaaggaattggtgacaaaattggaatgttctttcagtcaatggcaacatttttcactgggtttatagtaggatttacacgtggttggaagctaacccttgtgattttggccatcagtcctgttcttggactgtcagctgctgtctgggcaaagatactatcttcatttactgataaagaactcttagcgtatgcaaaagctggagcagtagctgaagaggtcttggcagcaattagaactgtgattgcatttggaggacaaaagaaagaacttgaaaggtacaacaaaaatttagaagaagctaaaagaattgggataaagaaagctattacagccaatatttctataggtgctgctttcctgctgatctatgcatcttatgctctggccttctggtatgggaccaccttggtcctctcaggggaatattctattggacaagtactcactgtattcttttctgtattaattggggcttttagtgttggacaggcatctccaagcattgaagcatttgcaaatgcaagaggagcagcttatgaaatcttcaagataattgataataagccaagtattgacagctattcgaagagtgggcacaaaccagataatattaagggaaatttggaattcagaaatgttcacttcagttacccatctcgaaaagaagttaagatcttgaagggtctgaacctgaaggtgcagagtgggcagacggtggccctggttggaaacagtggctgtgggaagagcacaacagtccagctgatgcagaggctctatgaccccacagaggggatggtcagtgttgatggacaggatattaggaccataaatgtaaggtttctacgggaaatcattggtgtggtgagtcaggaacctgtattgtttgccaccacgatagctgaaaacattcgctatggccgtgaaaatgtcaccatggatgagattgagaaagctgtcaaggaagccaatgcctatgactttatcatgaaactgcctcataaatttgacaccctggttggagagagaggggcccagttgagtggtgggcagaagcagaggatcgccattgcacgtgccctggttcgcaaccccaagatcctcctgctggatgaggccacgtcagccttggacacagaaagcgaagcagtggttcaggtggctctggataaggccagaaaaggtcggaccaccattgtgatagctcatcgtttgtctacagttcgtaatgctgacgtcatcgctggtttcgatgatggagtcattgtggagaaaggaaatcatgatgaactcatgaaagagaaaggcatttacttcaaacttgtcacaatgcagacagcaggaaatgaagttgaattagaaaatgcagctgatgaatccaaaagtgaaattgatgccttggaaatgtcttcaaatgattcaagatccagtctaataagaaaaagatcaactcgtaggagtgtccgtggatcacaagcccaagacagaaagcttagtaccaaagaggctctggatgaaagtatacctccagtttccttttggaggattatgaagctaaatttaactgaatggccttattttgttgttggtgtattttgtgccattataaatggaggcctgcaaccagcatttgcaataatattttcaaagattataggggtttttacaagaattgatgatcctgaaacaaaacgacagaatagtaacttgttttcactattgtttctagcccttggaattatttcttttattacatttttccttcagggtttcacatttggcaaagctggagagatcctcaccaagcggctccgatacatggttttccgatccatgctcagacaggatgtgagttggtttgatgaccctaaaaacaccactggagcattgactaccaggctcgccaatgatgctgctcaagttaaaggggctataggttccaggcttgctgtaattacccagaatatagcaaatcttgggacaggaataattatatccttcatctatggttggcaactaacactgttactcttagcaattgtacccatcattgcaatagcaggagttgttgaaatgaaaatgttgtctggacaagcactgaaagataagaaagaactagaaggttctgggaagatcgctactgaagcaatagaaaacttccgaaccgttgtttctttgactcaggagcagaagtttgaacatatgtatgctcagagtttgcaggtaccatacagaaactctttgaggaaagcacacatctttggaattacattttccttcacccaggcaatgatgtatttttcctatgctggatgtttccggtttggagcctacttggtggcacataaactcatgagctttgaggatgttctgttagtattttcagctgttgtctttggtgccatggccgtggggcaagtcagttcatttgctcctgactatgccaaagccaaaatatcagcagcccacatcatcatgatcattgaaaaaacccctttgattgacagctacagcacggaaggcctaatgccgaacacattggaaggaaatgtcacatttggtgaagttgtattcaactatcccacccgaccggacatcccagtgcttcagggactgagcctggaggtgaagaagggccagacgctggctctggtgggcagcagtggctgtgggaagagcacagtggtccagctcctggagcggttctacgaccccttggcagggaaagtgctgcttgatggcaaagaaataaagcgactgaatgttcagtggctccgagcacacctgggcatcgtgtcccaggagcccatcctgtttgactgcagcattgctgagaacattgcctatggagacaacagccgggtggtgtcacaggaagagattgtgagggcagcaaaggaggccaacatacatgccttcatcgagtcactgcctaataaatatagcactaaagtaggagacaaaggaactcagctctctggtggccagaaacaacgcattgccatagctcgtgcccttgttagacagcctcatattttgcttttggatgaagccacgtcagctctggatacagaaagtgaaaaggttgtccaagaagccctggacaaagccagagaaggccgcacctgcattgtgattgctcaccgcctgtccaccatccagaatgcagacttaatagtggtgtttcagaatggcagagtcaaggagcatggcacgcatcagcagctgctggcacagaaaggcatctatttttcaatggtcagtgtccaggctggaacaaagcgccag

SEQ ID NO: 162 - DNA, 990 bp, Homo sapiens
  Arginase1, isoform 1
atgagcgccaagtccagaaccatagggattattggagctcctttctcaaagggacagccacgaggaggggtggaagaaggccctacagtattgagaaaggctggtctgcttgagaaacttaaagaacaagtaactcaaaactttttaattttagagtgtgatgtgaaggattatggggacctgccctttgctgacatccctaatgacagtccctttcaaattgtgaagaatccaaggtctgtgggaaaagcaagcgagcagctggctggcaaggtggcagaagtcaagaagaacggaagaatcagcctggtgctgggcggagaccacagtttggcaattggaagcatctctggccatgccagggtccaccctgatcttggagtcatctgggtggatgctcacactgatatcaacactccactgacaaccacaagtggaaacttgcatggacaacctgtatctttcctcctgaaggaactaaaaggaaagattcccgatgtgccaggattctcctgggtgactccctgtatatctgccaaggatattgtgtatattggcttgagagacgtggaccctggggaacactacattttgaaaactctaggcattaaatacttttcaatgactgaagtggacagactaggaattggcaaggtgatggaagaaacactcagctatctactaggaagaaagaaaaggccaattcatctaagttttgatgttgacggactggacccatctttcacaccagctactggcacaccagtcgtgggaggtctgacatacagagaaggtctctacatcacagaagaaatctacaaaacagggctactctcaggattagatataatggaagtgaacccatccctggggaagacaccagaagaagtaactcgaacagtgaacacagcagttgcaataaccttggcttgtttcggacttgctcgggagggtaatcacaagcctattgactaccttaacccacctaag

SEQ ID NO: 163 - DNA, 3459 bp, Homo sapiens
  nitric oxide synthase, inducible (iNOS/NOS2), isoform 1
atggcctgtccttggaaatttctgttcaagaccaaattccaccagtatgcaatgaatggggaaaaagacatcaacaacaatgtggagaaagccccctgtgccacctccagtccagtgacacaggatgaccttcagtatcacaacctcagcaagcagcagaatgagtccccgcagcccctcgtggagacgggaaagaagtctccagaatctctggtcaagctggatgcaaccccattgtcctccccacggcatgtgaggatcaaaaactggggcagcgggatgactttccaagacacacttcaccataaggccaaagggattttaacttgcaggtccaaatcttgcctggggtccattatgactcccaaaagtttgaccagaggacccagggacaagcctacccctccagatgagcttctacctcaagctatcgaatttgtcaaccaatattacggctccttcaaagaggcaaaaatagaggaacatctggccagggtggaagcggtaacaaaggagatagaaacaacaggaacctaccaactgacgggagatgagctcatcttcgccaccaagcaggcctggcgcaatgccccacgctgcattgggaggatccagtggtccaacctgcaggtcttcgatgcccgcagctgttccactgcccgggaaatgtttgaacacatctgcagacacgtgcgttactccaccaacaatggcaacatcaggtcggccatcaccgtgttcccccagcggagtgatggcaagcacgacttccgggtgtggaatgctcagctcatccgctatgctggctaccagatgccagatggcagcatcagaggggaccctgccaacgtggaattcactcagctgtgcatcgacctgggctggaagcccaagtacggccgcttcgatgtggtccccctggtcctgcaggccaatggccgtgaccctgagctcttcgaaatcccacctgaccttgtgcttgaggtggccatggaacatcccaaatacgagtggtttcgggaactggagctaaagtggtacgccctgcctgcagtggccaacatgctgcttgaggtgggcggcctggagttcccagggtgccccttcaatggctggtacatgggcacagagatcggagtccgggacttctgtgacgtccagcgctacaacatcctggaggaagtgggcaggagaatgggcctggaaacgcacaagctggcctcgctctggaaagaccaggctgtcgttgagatcaacattgctgtgctccatagtttccagaagcagaatgtgaccatcatggaccaccactcggctgcagaatccttcatgaagtacatgcagaatgaataccggtcccgtgggggctgcccggcagactggatttggctggtccctcccatgtctgggagcatcacccccgtgtttcaccaggagatgctgaactacgtcctgtcccctttctactactatcaggtagaggcctggaaaacccatgtctggcaggacgagaagcggagacccaagagaagagagattccattgaaagtcttggtcaaagctgtgctctttgcctgtatgctgatgcgcaagacaatggcgtcccgagtcagagtcaccatcctctttgcgacagagacaggaaaatcagaggcgctggcctgggacctgggggccttattcagctgtgccttcaaccccaaggttgtctgcatggataagtacaggctgagctgcctggaggaggaacggctgctgttggtggtgaccagtacgtttggcaatggagactgccctggcaatggagagaaactgaagaaatcgctcttcatgctgaaagagctcaacaacaaattcaggtacgctgtgtttggcctcggctccagcatgtaccctcggttctgcgcctttgctcatgacattgatcagaagctgtcccacctgggggcctctcagctcaccccgatgggagaaggggatgagctcagtgggcaggaggacgccttccgcagctgggccgtgcaaaccttcaaggcagcctgtgagacgtttgatgtccgaggcaaacagcacattcagatccccaagctctacacctccaatgtgacctgggacccgcaccactacaggctcgtgcaggactcacagcctttggacctcagcaaagccctcagcagcatgcatgccaagaacgtgttcaccatgaggctcaaatctcggcagaatctacaaagtccgacatccagccgtgccaccatcctggtggaactctcctgtgaggatggccaaggcctgaactacctgccgggggagcaccttggggtttgcccaggcaaccagccggccctggtccaaggtatcctggagcgagtggtggatggccccacaccccaccagacagtgcgcctggaggccctggatgagagtggcagctactgggtcagtgacaagaggctgcccccctgctcactcagccaggccctcacctacttcctggacatcaccacacccccaacccagctgctgctccaaaagctggcccaggtggccacagaagagcctgagagacagaggctggaggccctgtgccagccctcagagtacagcaagtggaagttcaccaacagccccacattcctggaggtgctagaggagttcccgtccctgcgggtgtctgctggcttcctgctttcccagctccccattctgaagcccaggttctactccatcagctcctcccgggatcacacgcccacagagatccacctgactgtggccgtggtcacctaccacacccgagatggccagggtcccctgcaccacggcgtctgcagcacatggctcaacagcctgaagccccaagacccagtgccctgctttgtgcggaatgccagcggcttccacctccccgaggatccctcccatccttgcatcctcatcgggcctggcacaggcatcgcgcccttccgcagtttctggcagcaacggctccatgactcccagcacaagggagtgcggggaggccgcatgaccttggtgtttgggtgccgccgcccagatgaggaccacatctaccaggaggagatgctggagatggcccagaagggggtgctgcatgcggtgcacacagcctattcccgcctgcctggcaagcccaaggtctatgttcaggacatcctgcggcagcagctggccagcgaggtgctccgtgtgctccacaaggagccaggccacctctatgtttgcggggatgtgcgcatggcccgggacgtggcccacaccctgaagcagctggtggctgccaagctgaaattgaatgaggagcaggtcgaggactatttctttcagctcaagagccagaagcgctatcacgaagatatctttggtgctgtatttccttacgaggcgaagaaggacagggtggcggtgcagcccagcagcctggagatgtcagcgctc

SEQ ID NO: 164 - DNA, 3765 bp, Homo sapiens
  Her2
atggagctggcggccttgtgccgctgggggctcctcctcgccctcttgccccccggagccgcgagcacccaagtgtgcaccggcacagacatgaagctgcggctccctgccagtcccgagacccacctggacatgctccgccacctctaccagggctgccaggtggtgcagggaaacctggaactcacctacctgcccaccaatgccagcctgtccttcctgcaggatatccaggaggtgcagggctacgtgctcatcgctcacaaccaagtgaggcaggtcccactgcagaggctgcggattgtgcgaggcacccagctctttgaggacaactatgccctggccgtgctagacaatggagacccgctgaacaataccacccctgtcacaggggcctccccaggaggcctgcgggagctgcagcttcgaagcctcacagagatcttgaaaggaggggtcttgatccagcggaacccccagctctgctaccaggacacgattttgtggaaggacatcttccacaagaacaaccagctggctctcacactgatagacaccaaccgctctcgggcctgccacccctgttctccgatgtgtaagggctcccgctgctggggagagagttctgaggattgtcagagcctgacgcgcactgtctgtgccggtggctgtgcccgctgcaaggggccactgcccactgactgctgccatgagcagtgtgctgccggctgcacgggccccaagcactctgactgcctggcctgcctccacttcaaccacagtggcatctgtgagctgcactgcccagccctggtcacctacaacacagacacgtttgagtccatgcccaatcccgagggccggtatacattcggcgccagctgtgtgactgcctgtccctacaactacctttctacggacgtgggatcctgcaccctcgtctgccccctgcacaaccaagaggtgacagcagaggatggaacacagcggtgtgagaagtgcagcaagccctgtgcccgagtgtgctatggtctgggcatggagcacttgcgagaggtgagggcagttaccagtgccaatatccaggagtttgctggctgcaagaagatctttgggagcctggcatttctgccggagagctttgatggggacccagcctccaacactgccccgctccagccagagcagctccaagtgtttgagactctggaagagatcacaggttacctatacatctcagcatggccggacagcctgcctgacctcagcgtcttccagaacctgcaagtaatccggggacgaattctgcacaatggcgcctactcgctgaccctgcaagggctgggcatcagctggctggggctgcgctcactgagggaactgggcagtggactggccctcatccaccataacacccacctctgcttcgtgcacacggtgccctgggaccagctctttcggaacccgcaccaagctctgctccacactgccaaccggccagaggacgagtgtgtgggcgagggcctggcctgccaccagctgtgcgcccgagggcactgctggggtccagggcccacccagtgtgtcaactgcagccagttccttcggggccaggagtgcgtggaggaatgccgagtactgcaggggctccccagggagtatgtgaatgccaggcactgtttgccgtgccaccctgagtgtcagccccagaatggctcagtgacctgttttggaccggaggctgaccagtgtgtggcctgtgcccactataaggaccctcccttctgcgtggcccgctgccccagcggtgtgaaacctgacctctcctacatgcccatctggaagtttccagatgaggagggcgcatgccagccttgccccatcaactgcacccactcctgtgtggacctggatgacaagggctgccccgccgagcagagagccagccctctgacgtccatcatctctgcggtggttggcattctgctggtcgtggtcttgggggtggtctttgggatcctcatcaagcgacggcagcagaagatccggaagtacacgatgcggagactgctgcaggaaacggagctggtggagccgctgacacctagcggagcgatgcccaaccaggcgcagatgcggatcctgaaagagacggagctgaggaaggtgaaggtgcttggatctggcgcttttggcacagtctacaagggcatctggatccctgatggggagaatgtgaaaattccagtggccatcaaagtgttgagggaaaacacatcccccaaagccaacaaagaaatcttagacgaagcatacgtgatggctggtgtgggctccccatatgtctcccgccttctgggcatctgcctgacatccacggtgcagctggtgacacagcttatgccctatggctgcctcttagaccatgtccgggaaaaccgcggacgcctgggctcccaggacctgctgaactggtgtatgcagattgccaaggggatgagctacctggaggatgtgcggctcgtacacagggacttggccgctcggaacgtgctggtcaagagtcccaaccatgtcaaaattacagacttcgggctggctcggctgctggacattgacgagacagagtaccatgcagatgggggcaaggtgcccatcaagtggatggcgctggagtccattctccgccggcggttcacccaccagagtgatgtgtggagttatggtgtgactgtgtgggagctgatgacttttggggccaaaccttacgatgggatcccagcccgggagatccctgacctgctggaaaagggggagcggctgccccagccccccatctgcaccattgatgtctacatgatcatggtcaaatgttggatgattgactctgaatgtcggccaagattccgggagttggtgtctgaattctcccgcatggccagggacccccagcgctttgtggtcatccagaatgaggacttgggcccagccagtcccttggacagcaccttctaccgctcactgctggaggacgatgacatgggggacctggtggatgctgaggagtatctggtaccccagcagggcttcttctgtccagaccctgccccgggcgctgggggcatggtccaccacaggcaccgcagctcatctaccaggagtggcggtggggacctgacactagggctggagccctctgaagaggaggcccccaggtctccactggcaccctccgaaggggctggctccgatgtatttgatggtgacctgggaatgggggcagccaaggggctgcaaagcctccccacacatgaccccagccctctacagcggtacagtgaggaccccacagtacccctgccctctgagactgatggctacgttgcccccctgacctgcagcccccagcctgaatatgtgaaccagccagatgttcggccccagcccccttcgccccgagagggccctctgcctgctgcccgacctgctggtgccactctggaaaggcccaagactctctccccagggaagaatggggtcgtcaaagacgtttttgcctttgggggtgccgtggagaaccccgagtacttgacaccccagggaggagctgcccctcagccccaccctcctcctgccttcagcccagccttcgacaacctctattactgggaccaggacccaccagagcggggggctccacccagcaccttcaaagggacacctacggcagagaacccagagtacctgggtctggacgtgccagtg

SEQ ID NO: 165 - DNA, 567 bp, Homo sapiens
  KRAS
atgactgaatataaacttgtggtagttggagctggtggcgtaggcaagagtgccttgacgatacagctaattcagaatcattttgtggacgaatatgatccaacaatagaggattcctacaggaagcaagtagtaattgatggagaaacctgtctcttggatattctcgacacagcaggtcaagaggagtacagtgcaatgagggaccagtacatgaggactggggagggctttctttgtgtatttgccataaataatactaaatcatttgaagatattcaccattatagagaacaaattaaaagagttaaggactctgaagatgtacctatggtcctagtaggaaataaatgtgatttgccttctagaacagtagacacaaaacaggctcaggacttagcaagaagttatggaattccttttattgaaacatcagcaaagacaagacagagagtggaggatgctttttatacattggtgagggagatccgacaatacagattgaaaaaaatcagcaaagaagaaaagactcctggctgtgtgaaaattaaaaaatgcattataatg

SEQ ID NO: 166 - DNA, 1809 bp, Homo sapiens
  PLK1
atgagtgctgcagtgactgcagggaagctggcacgggcaccggccgaccctgggaaagccggggtccccggagttgcagctcccggagctccggcggcggctccaccggcgaaagagatcccggaggtcctagtggacccacgcagccggcggcgctatgtgcggggccgctttttgggcaagggcggctttgccaagtgcttcgagatctcggacgcggacaccaaggaggtgttcgcgggcaagattgtgcctaagtctctgctgctcaagccgcaccagagggagaagatgtccatggaaatatccattcaccgcagcctcgcccaccagcacgtcgtaggattccacggctttttcgaggacaacgacttcgtgttcgtggtgttggagctctgccgccggaggtctctcctggagctgcacaagaggaggaaagccctgactgagcctgaggcccgatactacctacggcaaattgtgcttggctgccagtacctgcaccgaaaccgagttattcatcgagacctcaagctgggcaaccttttcctgaatgaagatctggaggtgaaaataggggattttggactggcaaccaaagtcgaatatgacggggagaggaagaagaccctgtgtgggactcctaattacatagctcccgaggtgctgagcaagaaagggcacagtttcgaggtggatgtgtggtccattgggtgtatcatgtataccttgttagtgggcaaaccaccttttgagacttcttgcctaaaagagacctacctccggatcaagaagaatgaatacagtattcccaagcacatcaaccccgtggccgcctccctcatccagaagatgcttcagacagatcccactgcccgcccaaccattaacgagctgcttaatgacgagttctttacttctggctatatccctgcccgtctccccatcacctgcctgaccattccaccaaggttttcgattgctcccagcagcctggaccccagcaaccggaagcccctcacagtcctcaataaaggcttggagaaccccctgcctgagcgtccccgggaaaaagaagaaccagtggttcgagagacaggtgaggtggtcgactgccacctcagtgacatgctgcagcagctgcacagtgtcaatgcctccaagccctcggagcgtgggctggtcaggcaagaggaggctgaggatcctgcctgcatccccatcttctgggtcagcaagtgggtggactattcggacaagtacggccttgggtatcagctctgtgataacagcgtgggggtgctcttcaatgactcaacacgcctcatcctctacaatgatggtgacagcctgcagtacatagagcgtgacggcactgagtcctacctcaccgtgagttcccatcccaactccttgatgaagaagatcaccctccttaaatatttccgcaattacatgagcgagcacttgctgaaggcaggtgccaacatcacgccgcgcgaaggtgatgagctcgcccggctgccctacctacggacctggttccgcacccgcagcgccatcatcctgcacctcagcaacggcagcgtgcagatcaacttcttccaggatcacaccaagctcatcttgtgcccactgatggcagccgtgacctacatcgacgagaagcgggacttccgcacataccgcctgagtctcctggaggagtacggctgctgcaaggagctggccagccggctccgctacgcccgcactatggtggacaagctgctgagctcacgctcggccagcaaccgtctcaaggcctcc

SEQ ID NO: 167 - DNA, 876 bp, Salmonella typhimurium
  dapA, strain LT2
atgttcacgggaagtattgtcgcgcttgttacgccgatggatgagaaaggtaacgtcagtaggtcttgcctgaaaaaactcattgattatcatgtcgccaacggtacctcggcgattgtttcggttggcactaccggcgagtctgccacgctaagccatgatgaacatggcgatgtcgtgatgatgacgctggaactggctgacggacgtattccggttatcgccggcacgggcgcaaacgcgaccgcggaagcgattagcctgacgcagcgttttaacgatagcggtattgtaggctgcctgacggtaacgccgtactacaatcgccccacgcaggaaggtttgttccagcatttcaaagccatcgcggaacacactgacttgccgcaaattctgtataatgtgccgtcccgtaccggttgcgatatgttgccggaaaccgtgggtcgtctggcggaaataaaaaatattatcgctatcaaagaggcgacagggaacttaacccgcgttcaccagatcaaagagctggtttcagacgattttattctgcttagcggcgatgacgcgtctgcgctggactttatgcaactgggtggtcatggcgtgatttccgttacggctaacgtagcggcgcgcgagatggctgacatgtgcaaactggcggcggaagggcaatttgccgaggcgcgcgctatcaaccagcgtctgatgccgttacacaacaaactatttgtcgaacccaatcctatcccggtgaaatgggcatgtaaggcattgggtcttgtggcgaccgacacgctgcgcctgccaatgacgcctatcacggaccatggtcgtgacatcgtcaaagcagcgcttcagcatgctggcctgctg

SEQ ID NO: 168 - DNA, 819 bp, Salmonella typhimurium
  dapB, strain LT2
atgcatgaagcacaaatccgcgtcgccattgccggcgccggtggccgcatgggacggcagttaatccaggccgccatggcgatggaaggtgttcagctgggtgccgcgctggagcgcgaaggctcttccttgctgggcagcgatgctggcgaactggcaggggcgggaaagtccggcgtgatcgttcaaagcagccttgaggcggtaaaagatgattttgacgttttcatcgattttacccgtccggaaggcacgttgacgcatctggcgttttgccgccagcatggtaaagggatggtgattggtactaccggctttgacgacgccggtaaacaagccattcgcgaggcgtcacaagagattgcgatcgttttcgccgcaaactttagcgtcggcgttaacgtcatgctcaagctgctggagaaagccgcgaaggtaatgggcgactatagcgatattgaaattattgaagcgcaccaccgccataaagtggatgcaccgtcgggtacggcgctggcaatgggcgaggcaatcgccggggcgctggataaaaatctgaaggactgcgcggtctactcgcgtgaaggttataccggcgagcgcgtagcgggcacgattggctttgcgaccgttcgggcgggcgacatcgtcggcgaacataccgcgatgtttgccgatattggcgagcgcgtagagattacgcataaagcttccagccgcatgacgtttgcaaatggcgcgttgcgatcggcgttatggctaaaaacgaagaaaaatgggctatttgacatgcgggatgtgctggggctggatgtatta

SEQ ID NO: 169 - DNA, 876 bp, E. coli
  dapA
atgttcacgggaagtattgtcgcgattgttactccgatggatgaaaaaggtaatgtctgtcgggctagcttgaaaaaactgattgattatcatgtcgccagcggtacttcggcgatcgtttctgttggcaccactggcgagtccgctaccttaaatcatgacgaacatgctgatgtggtgatgatgacgctggatctggctgatgggcgcattccggtaattgccgggaccggcgctaacgctactgcggaagccattagcctgacgcagcgcttcaatgacagtggtatcgtcggctgcctgacggtaaccccttactacaatcgtccgtcgcaagaaggtttgtatcagcatttcaaagccatcgctgagcatactgacctgccgcaaattctgtataatgtgccgtcccgtactggctgcgatctgctcccggaaacggtgggccgtctggcgaaagtaaaaaatattatcggaatcaaagaggcaacagggaacttaacgcgtgtaaaccagatcaaagagctggtttcagatgattttgttctgctgagcggcgatgatgcgagcgcgctggacttcatgcaattgggcggtcatggggttatttccgttacgactaacgtcgcagcgcgtgatatggcccagatgtgcaaactggcagcagaagaacattttgccgaggcacgcgttattaatcagcgtctgatgccattacacaacaaactatttgtcgaacccaatccaatcccggtgaaatgggcatgtaaggaactgggtcttgtggcgaccgatacgctgcgcctgccaatgacaccaatcaccgacagtggtcgtgagacggtcagagcggcgcttaagcatgccggtttgctg

SEQ ID NO: 170 - DNA, 819 bp, E. coli
  dapB
atgcatgatgcaaacatccgcgttgccatcgcgggagccggggggcgtatgggccgccagttgattcaggcggcgctggcattagagggcgtgcagttgggcgctgcgctggagcgtgaaggatcttctttactgggcagcgacgccggtgagctggccggagccgggaaaacaggcgttaccgtgcaaagcagcctcgatgcggtaaaagatgattttgatgtgtttatcgattttacccgtccggaaggtacgctgaaccatctcgctttttgtcgccagcatggcaaagggatggtgatcggcactacggggtttgacgaagccggtaaacaagcaattcgtgacgccgctgccgatattgcgattgtctttgcggccaattttagcgttggcgttaacgtcatgcttaagctgctggagaaagcagccaaagtgatgggtgactacaccgatatcgaaattattgaagcacatcatagacataaagttgatgcgccgtcaggcaccgcactggcaatgggagaggcgatcgcccacgcccttgataaagatctgaaagattgcgcggtctacagtcgtgaaggccacaccggtgaacgtgtgcctggcaccattggttttgccaccgtgcgtgcaggtgacatcgttggtgaacataccgcgatgtttgccgatattggcgagcgtctggagatcacccataaggcgtccagccgtatgacatttgctaacggcgcggtaagatcggctttgtggttgagtggtaaggaaagcggtctttttgatatgcgagatgtacttgatctcaataatttg

SEQ ID NO: 171 - DNA, 1218 bp, E. coli
  dapC
atggcaattgaacaaacagcaattacacgcgcgactttcgatgaagtgatcctgccgatttatgctccggcagagtttattccggtaaaaggtcagggcagccgaatctgggatcagcaaggcaaggagtatgtcgatttcgcgggtggcattgcagttacggcgttgggccattgccatcctgcgctggtgaacgcgttaaaaacccagggcgaaactctgtggcatatcagtaacgttttcaccaatgaaccggcgctgcgtcttgggcgtaaactgattgaggcaacgtttgccgaacgcgtggtgtttatgaactccggcacggaagctaacgaaaccgcctttaaactggcacgccattacgcctgtgtgcgtcatagcccgttcaaaaccaaaattattgccttccataacgcttttcatggtcgctcgctgtttaccgtttcggtgggtgggcagccaaaatattccgacggctttgggccgaaaccggcagacatcatccacgttccctttaacgatctccatgcagtgaaagcggtgatggatgatcacacctgtgcggtggtggttgagccgatccagggcgagggcggtgtgacggcagcgacgccagagtttttgcagggcttgcgcgagctgtgcgatcaacatcaggcattattggtgtttgatgaagtgcagtgcgggatggggcggaccggcgatttgtttgcttacatgcactacgcgttagcgccggatattctgacctctgcgaaagcgttaggcggcggcttcccgattagcgccatgctgaccacggcggaaattgcttctgcgtttcatcctggttctcacggttccacctacggcggtaatcctctggcctgtgcagtagcgggggcggcgtttgatatcatcaatacccctgaagtgctggaaggcattcaggcgaaacgccagcgttttgttgaccatctgcagaagatcgatcagcagtacgatgtatttagcgatattcgcggtatggggctgttgattggcgcagagctgaaaccacagtacaaaggtcgggcgcgtgatttcctgtatgcgggcgcagaggctggcgtaatggtgctgaatgccggaccggatgtgatgcgttttgcaccgtcgctggtggtggaagatgcggatatcgatgaagggatgcaacgtttcgcccacgcggtggcgaaggtggttggggcg

SEQ ID NO: 172 - DNA, 822 bp, E. coli
  dapD
atgcagcagttacagaacattattgaaaccgcttttgaacgccgtgccgagatcacgccagccaatgcagacaccgttacccgcgaagcggataatcaggtgatcgccctgctggattccggcgcactgcgtgtagcggaaaaaattgacggtcagtgggtgacgcatcagtggttgaaaaaagcggtgctgctctctttccgtattaatgataatcaggtgatcgaaggggcagaaagccgctacttcgacaaagtgccgatgaaattcgccgactacgacgaagcacgtttccagaaagaaggcttccgcgttgtgccaccagcggcggtacgtcagggtgcgtttattgcccgtaacaccgtgctgatgccgtcttacgtcaacatcggcgcatatgttgatgaaggcaccatggttgatacctgggcgaccgtcggttcttgtgcgcagattggtaaaaacgttcacctttccggtggcgtgcgcatcggcggcgtgctggaaccgctgcaggctaacccaaccatgattgaagataattgcttcatcggcgcgcgctctgaactggttgaaggggtgattgtcgaagaaggttccgtcatttccatgggcgtatacattggtcagagcacccgtatttacgaccgtgaaaccggcgaaatccactacggtcgcgttccggcggggtctgtggttgtttcaggtaatctgccgtcaaaagatggcaaatacagcctctactgtgcggttatcgttaagaaagttgacgcgaaaactcgcggcaaagtcggcattaacgaactgctgcgtaccatcgac

SEQ ID NO: 173 - DNA, 1125 bp, E. coli
  dapE
atgtcgtgcccggttattgagctgacacaacagcttattcgccgcccttccctgagtcctgatgatgcaggatgccaggctttgttgattgaacgtttgcaggcgatcggttttaccgttgaacgcatggactttgccgatacgcagaatttttgggcatggcgtgggcagggtgaaacgttagcctttgccgggcataccgacgtggtgccgcctggcgacgccgatcgttggatcaatcccccgtttgaacccaccattcgtgacggcatgttattcgggcgcggtgcggcagatatgaaaggctcgctggcggcgatggtggtggcggcagaacgttttgtcgcacaacatcccaaccatacggggcgactggcatttctgatcacctctgatgaagaagccagtgcccacaacggtacggtaaaagtcgtcgaagcgttaatggcacgtaatgagcgtctcgattactgcctggttggcgaaccgtcgagtatcgaagtggtaggtgatgtggtgaaaaatggtcgtcgcggatcattaacctgcaaccttaccattcatggcgttcaggggcatgttgcctacccacatctggctgacaatccggtacatcgcgcagcacctttccttaatgaattagtggctattgagtgggatcagggcaatgaattcttcccggcgaccagtatgcagattgccaatattcaggcgggaacgggcagtaacaacgttattccgggtgaactgtttgtgcagtttaacttccgcttcagcaccgaactgactgatgagatgatcaaagcgcaggtgcttgccctgcttgaaaaacatcaactgcgctatacggtggattggtggctttccgggcagccatttttgaccgcgcgcggtaaactggtggatgcggtcgttaacgcggttgagcactataatgaaattaaaccgcagctactgaccacaggcggaacgtccgacgggcgctttattgcccgcatgggggcgcaggtggtggaactcgggccggtcaatgccactattcataaaattaatgaatgtgtgaacgctgccgacctgcagctacttgcccgtatgtatcaacgtatcatggaacagctcgtcgcc

SEQ ID NO: 174 - DNA, 1179 bp, Homo sapiens
  p53
atggaggagccgcagtcagatcctagcgtcgagccccctctgagtcaggaaacattttcagacctatggaaactacttcctgaaaacaacgttctgtcccccttgccgtcccaagcaatggatgatttgatgctgtccccggacgatattgaacaatggttcactgaagacccaggtccagatgaagctcccagaatgccagaggctgctccccgcgtggcccctgcaccagcagctcctacaccggcggcccctgcaccagccccctcctggcccctgtcatcttctgtcccttcccagaaaacctaccagggcagctacggtttccgtctgggcttcttgcattctgggacagccaagtctgtgacttgcacgtactcccctgccctcaacaagatgttttgccaactggccaagacctgccctgtgcagctgtgggttgattccacacccccgcccggcacccgcgtccgcgccatggccatctacaagcagtcacagcacatgacggaggttgtgaggcgctgcccccaccatgagcgctgctcagatagcgatggtctggcccctcctcagcatcttatccgagtggaaggaaatttgcgtgtggagtatttggatgacagaaacacttttcgacatagtgtggtggtgccctatgagccgcctgaggttggctctgactgtaccaccatccactacaactacatgtgtaacagttcctgcatgggcggcatgaaccggaggcccatcctcaccatcatcacactggaagactccagtggtaatctactgggacggaacagctttgaggtgcatgtttgtgcctgtcctgggagagaccggcgcacagaggaagagaatctccgcaagaaaggggagcctcaccacgagctgcccccagggagcactaagcgagcactgtccaacaacaccagctcctctccccagccaaagaagaaaccactggatggagaatatttcacccttcagatccgtgggcgtgagcgcttcgagatgttccgagagctgaatgaggccttggaactcaaggatgcccaggctgggaaggagccaggggggagcagggctcactccagccacctgaagtccaaaaagggtcagtctacctcccgccataaaaaactcatgttcaagacagaagggcctgactcagac

SEQ ID NO: 175 - DNA, 1470 bp, Homo sapiens
  ERBA
atggaacagaagccaagcaaggtggagtgtgggtcagacccagaggagaacagtgccaggtcaccagatggaaagcgaaaaagaaagaacggccaatgttccctgaaaaccagcatgtcagggtatatccctagttacctggacaaagacgagcagtgtgtcgtgtgtggggacaaggcaactggttatcactaccgctgtatcacttgtgagggctgcaagggcttctttcgccgcacaatccagaagaacctccatcccacctattcctgcaaatatgacagctgctgtgtcattgacaagatcacccgcaatcagtgccagctgtgccgcttcaagaagtgcatcgccgtgggcatggccatggacttggttctagatgactcgaagcgggtggccaagcgtaagctgattgagcagaaccgggagcggcggcggaaggaggagatgatccgatcactgcagcagcgaccagagcccactcctgaagagtgggatctgatccacattgccacagaggcccatcgcagcaccaatgcccagggcagccattggaaacagaggcggaaattcctgcccgatgacattggccagtcacccattgtctccatgccggacggagacaaggtggacctggaagccttcagcgagtttaccaagatcatcaccccggccatcacccgtgtggtggactttgccaaaaaactgcccatgttctccgagctgccttgcgaagaccagatcatcctcctgaaggggtgctgcatggagatcatgtccctgcgggcggctgtccgctacgaccctgagagcgacaccctgacgctgagtggggagatggctgtcaagcgggagcagctcaagaatggcggcctgggcgtagtctccgacgccatctttgaactgggcaagtcactctctgcctttaacctggatgacacggaagtggctctgctgcaggctgtgctgctaatgtcaacagaccgctcgggcctgctgtgtgtggacaagatcgagaagagtcaggaggcgtacctgctggcgttcgagcactacgtcaaccaccgcaaacacaacattccgcacttctggcccaagctgctgatgaaggagagagaagtgcagagttcgattctgtacaagggggcagcggcagaaggccggccgggcgggtcactgggcgtccacccggaaggacagcagcttctcggaatgcatgttgttcagggtccgcaggtccggcagcttgagcagcagcttggtgaagcgggaagtctccaagggccggttcttcagcaccagagcccgaagagcccgcagcagcgtctcctggagctgctccaccgaagcggaattctccatgcccgagcggtctgtggggaagacgacagcagtgaggcggactccccgagctcctctgaggaggaaccggaggtctgcgaggacctggcaggcaatgcagcctctccc

SEQ ID NO: 176 - DNA, 1317 bp, Homo sapiens
  myc
atgcccctcaacgttagcttcaccaacaggaactatgacctcgactacgactcggtgcagccgtatttctactgcgacgaggaggagaacttctaccagcagcagcagcagagcgagctgcagcccccggcgcccagcgaggatatctggaagaaattcgagctgctgcccaccccgcccctgtcccctagccgccgctccgggctctgctcgccctcctacgttgcggtcacacccttctcccttcggggagacaacgacggcggtggcgggagcttctccacggccgaccagctggagatggtgaccgagctgctgggaggagacatggtgaaccagagtttcatctgcgacccggacgacgagaccttcatcaaaaacatcatcatccaggactgtatgtggagcggcttctcggccgccgccaagctcgtctcagagaagctggcctcctaccaggctgcgcgcaaagacagcggcagcccgaaccccgcccgcggccacagcgtctgctccacctccagcttgtacctgcaggatctgagcgccgccgcctcagagtgcatcgacccctcggtggtcttcccctaccctctcaacgacagcagctcgcccaagtcctgcgcctcgcaagactccagcgccttctctccgtcctcggattctctgctctcctcgacggagtcctccccgcagggcagccccgagcccctggtgctccatgaggagacaccgcccaccaccagcagcgactctgaggaggaacaagaagatgaggaagaaatcgatgttgtttctgtggaaaagaggcaggctcctggcaaaaggtcagagtctggatcaccttctgctggaggccacagcaaacctcctcacagcccactggtcctcaagaggtgccacgtctccacacatcagcacaactacgcagcgcctccctccactcggaaggactatcctgctgccaagagggtcaagttggacagtgtcagagtcctgagacagatcagcaacaaccgaaaatgcaccagccccaggtcctcggacaccgaggagaatgtcaagaggcgaacacacaacgtcttggagcgccagaggaggaacgagctaaaacggagcttttttgccctgcgtgaccagatcccggagttggaaaacaatgaaaaggcccccaaggtagttatccttaaaaaagccacagcatacatcctgtccgtccaagcagaggagcaaaagctcatttctgaagaggacttgttgcggaaacgacgagaacagttgaaacacaaacttgaacagctacggaactcttgtgcg

SEQ ID NO: 177 - DNA, 2283 bp, Homo sapiens
  MYB
atggcccgaagaccccggcacagcatatatagcagtgacgaggatgatgaggactttgagatgtgtgaccatgactatgatgggctgcttcccaagtctggaaagcgtcacttggggaaaacaaggtggacccgggaagaggatgaaaaactgaagaagctggtggaacagaatggaacagatgactggaaagttattgccaattatctcccgaatcgaacagatgtgcagtgccagcaccgatggcagaaagtactaaaccctgagctcatcaagggtccttggaccaaagaagaagatcagagagtgatagagcttgtacagaaatacggtccgaaacgttggtctgttattgccaagcacttaaaggggagaattggaaaacaatgtagggagaggtggcataaccacttgaatccagaagttaagaaaacctcctggacagaagaggaagacagaattatttaccaggcacacaagagactggggaacagatgggcagaaatcgcaaagctactgcctggacgaactgataatgctatcaagaaccactggaattctacaatgcgtcggaaggtcgaacaggaaggttatctgcaggagtcttcaaaagccagccagccagcagtggccacaagcttccagaagaacagtcatttgatgggttttgctcaggctccgcctacagctcaactccctgccactggccagcccactgttaacaacgactattcctattaccacatttctgaagcacaaaatgtctccagtcatgttccataccctgtagcgttacatgtaaatatagtcaatgtccctcagccagctgccgcagccattcagagacactataatgatgaagaccctgagaaggaaaagcgaataaaggaattagaattgctcctaatgtcaaccgagaatgagctaaaaggacagcaggtgctaccaacacagaaccacacatgcagctaccccgggtggcacagcaccaccattgccgaccacaccagacctcatggagacagtgcacctgtttcctgtttgggagaacaccactccactccatctctgccagcggatcctggctccctacctgaagaaagcgcctcgccagcaaggtgcatgatcgtccaccagggcaccattctggataatgttaagaacctcttagaatttgcagaaacactccaatttatagattctgattcttcatcatggtgtgatctcagcagttttgaattctttgaagaagcagatttttcacctagccaacatcacacaggcaaagccctacagcttcagcaaagagagggcaatgggactaaacctgcaggagaacctagcccaagggtgaacaaacgtatgttgagtgagagttcacttgacccacccaaggtcttacctcctgcaaggcacagcacaattccactggtcatccttcgaaaaaaacggggccaggccagccccttagccactggagactgtagctccttcatatttgctgacgtcagcagttcaactcccaagcgttcccctgtcaaaagcctacccttctctccctcgcagttcttaaacacttccagtaaccatgaaaactcagacttggaaatgccttctttaacttccacccccctcattggtcacaaattgactgttacaacaccatttcatagagaccagactgtgaaaactcaaaaggaaaatactgtttttagaaccccagctatcaaaaggtcaatcttagaaagctctccaagaactcctacaccattcaaacatgcacttgcagctcaagaaattaaatacggtcccctgaagatgctacctcagacaccctctcatctagtagaagatctgcaggatgtgatcaaacaggaatctgatgaatctggaattgttgctgagtttcaagaaaatggaccacccttactgaagaaaatcaaacaagaggtggaatctccaactgataaatcaggaaacttcttctgctcacaccactgggaaggggacagtctgaatacccaactgttcacgcagacctcgcctgtggcagatgcaccgaatattcttacaagctccgttttaatggcaccagcatcagaagatgaagacaatgttctcaaagcatttacagtacctaaaaacaggtccctggcgagccccttgcagccttgtagcagtacctgggaacctgcatcctgtggaaagatggaggagcagatgacatcttccagtcaagctcgtaaatacgtgaatgcattctcagcccggacgctggtcatg

SEQ ID NO: 178 - DNA, 993 bp, Homo sapiens
  JUN
atgactgcaaagatggaaacgaccttctatgacgatgccctcaacgcctcgttcctcccgtccgagagcggaccttatggctacagtaaccccaagatcctgaaacagagcatgaccctgaacctggccgacccagtggggagcctgaagccgcacctccgcgccaagaactcggacctcctcacctcgcccgacgtggggctgctcaagctggcgtcgcccgagctggagcgcctgataatccagtccagcaacgggcacatcaccaccacgccgacccccacccagttcctgtgccccaagaacgtgacagatgagcaggagggcttcgccgagggcttcgtgcgcgccctggccgaactgcacagccagaacacgctgcccagcgtcacgtcggcggcgcagccggtcaacggggcaggcatggtggctcccgcggtagcctcggtggcagggggcagcggcagcggcggcttcagcgccagcctgcacagcgagccgccggtctacgcaaacctcagcaacttcaacccaggcgcgctgagcagcggcggcggggcgccctcctacggcgcggccggcctggcctttcccgcgcaaccccagcagcagcagcagccgccgcaccacctgccccagcagatgcccgtgcagcacccgcggctgcaggccctgaaggaggagcctcagacagtgcccgagatgcccggcgagacaccgcccctgtcccccatcgacatggagtcccaggagcggatcaaggcggagaggaagcgcatgaggaaccgcatcgctgcctccaagtgccgaaaaaggaagctggagagaatcgcccggctggaggaaaaagtgaaaaccttgaaagctcagaactcggagctggcgtccacggccaacatgctcagggaacaggtggcacagcttaaacagaaagtcatgaaccacgttaacagtgggtgccaactcatgctaacgcagcagttgcaaacattt

SEQ ID NO: 179 - DNA, 3633 bp, Homo sapiens
  ERBB
atgcgaccctccgggacggccggggcagcgctcctggcgctgctggctgcgctctgcccggcgagtcgggctctggaggaaaagaaagtttgccaaggcacgagtaacaagctcacgcagttgggcacttttgaagatcattttctcagcctccagaggatgttcaataactgtgaggtggtccttgggaatttggaaattacctatgtgcagaggaattatgatctttccttcttaaagaccatccaggaggtggctggttatgtcctcattgccctcaacacagtggagcgaattcctttggaaaacctgcagatcatcagaggaaatatgtactacgaaaattcctatgccttagcagtcttatctaactatgatgcaaataaaaccggactgaaggagctgcccatgagaaatttacaggaaatcctgcatggcgccgtgcggttcagcaacaaccctgccctgtgcaacgtggagagcatccagtggcgggacatagtcagcagtgactttctcagcaacatgtcgatggacttccagaaccacctgggcagctgccaaaagtgtgatccaagctgtcccaatgggagctgctggggtgcaggagaggagaactgccagaaactgaccaaaatcatctgtgcccagcagtgctccgggcgctgccgtggcaagtcccccagtgactgctgccacaaccagtgtgctgcaggctgcacaggcccccgggagagcgactgcctggtctgccgcaaattccgagacgaagccacgtgcaaggacacctgccccccactcatgctctacaaccccaccacgtaccagatggatgtgaaccccgagggcaaatacagctttggtgccacctgcgtgaagaagtgtccccgtaattatgtggtgacagatcacggctcgtgcgtccgagcctgtggggccgacagctatgagatggaggaagacggcgtccgcaagtgtaagaagtgcgaagggccttgccgcaaagtgtgtaacggaataggtattggtgaatttaaagactcactctccataaatgctacgaatattaaacacttcaaaaactgcacctccatcagtggcgatctccacatcctgccggtggcatttaggggtgactccttcacacatactcctcctctggatccacaggaactggatattctgaaaaccgtaaaggaaatcacagggtttttgctgattcaggcttggcctgaaaacaggacggacctccatgcctttgagaacctagaaatcatacgcggcaggaccaagcaacatggtcagttttctcttgcagtcgtcagcctgaacataacatccttgggattacgctccctcaaggagataagtgatggagatgtgataatttcaggaaacaaaaatttgtgctatgcaaatacaataaactggaaaaaactgtttgggacctccggtcagaaaaccaaaattataagcaacagaggtgaaaacagctgcaaggccacaggccaggtctgccatgccttgtgctcccccgagggctgctggggcccggagcccagggactgcgtctcttgccggaatgtcagccgaggcagggaatgcgtggacaagtgcaaccttctggagggtgagccaagggagtttgtggagaactctgagtgcatacagtgccacccagagtgcctgcctcaggccatgaacatcacctgcacaggacggggaccagacaactgtatccagtgtgcccactacattgacggcccccactgcgtcaagacctgcccggcaggagtcatgggagaaaacaacaccctggtctggaagtacgcagacgccggccatgtgtgccacctgtgccatccaaactgcacctacggatgcactgggccaggtcttgaaggctgtccaacgaatgggcctaagatcccgtccatcgccactgggatggtgggggccctcctcttgctgctggtggtggccctggggatcggcctcttcatgcgaaggcgccacatcgttcggaagcgcacgctgcggaggctgctgcaggagagggagcttgtggagcctcttacacccagtggagaagctcccaaccaagctctcttgaggatcttgaaggaaactgaattcaaaaagatcaaagtgctgggctccggtgcgttcggcacggtgtataagggactctggatcccagaaggtgagaaagttaaaattcccgtcgctatcaaggaattaagagaagcaacatctccgaaagccaacaaggaaatcctcgatgaagcctacgtgatggccagcgtggacaacccccacgtgtgccgcctgctgggcatctgcctcacctccaccgtgcagctcatcacgcagctcatgcccttcggctgcctcctggactatgtccgggaacacaaagacaatattggctcccagtacctgctcaactggtgtgtgcagatcgcaaagggcatgaactacttggaggaccgtcgcttggtgcaccgcgacctggcagccaggaacgtactggtgaaaacaccgcagcatgtcaagatcacagattttgggctggccaaactgctgggtgcggaagagaaagaataccatgcagaaggaggcaaagtgcctatcaagtggatggcattggaatcaattttacacagaatctatacccaccagagtgatgtctggagctacggggtgactgtttgggagttgatgacctttggatccaagccatatgacggaatccctgccagcgagatctcctccatcctggagaaaggagaacgcctccctcagccacccatatgtaccatcgatgtctacatgatcatggtcaagtgctggatgatagacgcagatagtcgcccaaagttccgtgagttgatcatcgaattctccaaaatggcccgagacccccagcgctaccttgtcattcagggggatgaaagaatgcatttgccaagtcctacagactccaacttctaccgtgccctgatggatgaagaagacatggacgacgtggtggatgccgacgagtacctcatcccacagcagggcttcttcagcagcccctccacgtcacggactcccctcctgagctctctgagtgcaaccagcaacaattccaccgtggcttgcattgatagaaatgggctgcaaagctgtcccatcaaggaagacagcttcttgcagcgatacagctcagaccccacaggcgccttgactgaggacagcatagacgacaccttcctcccagtgcctgaatacataaaccagtccgttcccaaaaggcccgctggctctgtgcagaatcctgtctatcacaatcagcctctgaaccccgcgcccagcagagacccacactaccaggacccccacagcactgcagtgggcaaccccgagtatctcaacactgtccagcccacctgtgtcaacagcacattcgacagccctgcccactgggcccagaaaggcagccaccaaattagcctggacaaccctgactaccagcaggacttctttcccaaggaagccaagccaaatggcatctttaagggctccacagctgaaaatgcagaatacctaagggtcgcgccacaaagcagtgaatttattggagcatga

SEQ ID NO: 180 - DNA, 5589 bp, Homo sapiens
  BRCA1
atggatttatctgctcttcgcgttgaagaagtacaaaatgtcattaatgctatgcagaaaatcttagagtgtcccatctgtctggagttgatcaaggaacctgtctccacaaagtgtgaccacatattttgcaaattttgcatgctgaaacttctcaaccagaagaaagggccttcacagtgtcctttatgtaagaatgatataaccaaaaggagcctacaagaaagtacgagatttagtcaacttgttgaagagctattgaaaatcatttgtgcttttcagcttgacacaggtttggagtatgcaaacagctataattttgcaaaaaaggaaaataactctcctgaacatctaaaagatgaagtttctatcatccaaagtatgggctacagaaaccgtgccaaaagacttctacagagtgaacccgaaaatccttccttgcaggaaaccagtctcagtgtccaactctctaaccttggaactgtgagaactctgaggacaaagcagcggatacaacctcaaaagacgtctgtctacattgaattgggatctgattcttctgaagataccgttaataaggcaacttattgcagtgtgggagatcaagaattgttacaaatcacccctcaaggaaccagggatgaaatcagtttggattctgcaaaaaaggctgcttgtgaattttctgagacggatgtaacaaatactgaacatcatcaacccagtaataatgatttgaacaccactgagaagcgtgcagctgagaggcatccagaaaagtatcagggtagttctgtttcaaacttgcatgtggagccatgtggcacaaatactcatgccagctcattacagcatgagaacagcagtttattactcactaaagacagaatgaatgtagaaaaggctgaattctgtaataaaagcaaacagcctggcttagcaaggagccaacataacagatgggctggaagtaaggaaacatgtaatgataggcggactcccagcacagaaaaaaaggtagatctgaatgctgatcccctgtgtgagagaaaagaatggaataagcagaaactgccatgctcagagaatcctagagatactgaagatgttccttggataacactaaatagcagcattcagaaagttaatgagtggttttccagaagtgatgaactgttaggttctgatgactcacatgatggggagtctgaatcaaatgccaaagtagctgatgtattggacgttctaaatgaggtagatgaatattctggttcttcagagaaaatagacttactggccagtgatcctcatgaggctttaatatgtaaaagtgaaagagttcactccaaatcagtagagagtaatattgaagacaaaatatttgggaaaacctatcggaagaaggcaagcctccccaacttaagccatgtaactgaaaatctaattataggagcatttgttactgagccacagataatacaagagcgtcccctcacaaataaattaaagcgtaaaaggagacctacatcaggccttcatcctgaggattttatcaagaaagcagatttggcagttcaaaagactcctgaaatgataaatcagggaactaaccaaacggagcagaatggtcaagtgatgaatattactaatagtggtcatgagaataaaacaaaaggtgattctattcagaatgagaaaaatcctaacccaatagaatcactcgaaaaagaatctgctttcaaaacgaaagctgaacctataagcagcagtataagcaatatggaactcgaattaaatatccacaattcaaaagcacctaaaaagaataggctgaggaggaagtcttctaccaggcatattcatgcgcttgaactagtagtcagtagaaatctaagcccacctaattgtactgaattgcaaattgatagttgttctagcagtgaagagataaagaaaaaaaagtacaaccaaatgccagtcaggcacagcagaaacctacaactcatggaaggtaaagaacctgcaactggagccaagaagagtaacaagccaaatgaacagacaagtaaaagacatgacagcgatactttcccagagctgaagttaacaaatgcacctggttcttttactaagtgttcaaataccagtgaacttaaagaatttgtcaatcctagccttccaagagaagaaaaagaagagaaactagaaacagttaaagtgtctaataatgctgaagaccccaaagatctcatgttaagtggagaaagggttttgcaaactgaaagatctgtagagagtagcagtatttcattggtacctggtactgattatggcactcaggaaagtatctcgttactggaagttagcactctagggaaggcaaaaacagaaccaaataaatgtgtgagtcagtgtgcagcatttgaaaaccccaagggactaattcatggttgttccaaagataatagaaatgacacagaaggctttaagtatccattgggacatgaagttaaccacagtcgggaaacaagcatagaaatggaagaaagtgaacttgatgctcagtatttgcagaatacattcaaggtttcaaagcgccagtcatttgctccgttttcaaatccaggaaatgcagaagaggaatgtgcaacattctctgcccactctgggtccttaaagaaacaaagtccaaaagtcacttttgaatgtgaacaaaaggaagaaaatcaaggaaagaatgagtctaatatcaagcctgtacagacagttaatatcactgcaggctttcctgtggttggtcagaaagataagccagttgataatgccaaatgtagtatcaaaggaggctctaggttttgtctatcatctcagttcagaggcaacgaaactggactcattactccaaataaacatggacttttacaaaacccatatcgtataccaccactttttcccatcaagtcatttgttaaaactaaatgtaagaaaaatctgctagaggaaaactttgaggaacattcaatgtcacctgaaagagaaatgggaaatgagaacattccaagtacagtgagcacaattagccgtaataacattagagaaaatgtttttaaagaagccagctcaagcaatattaatgaagtaggttccagtactaatgaagtgggctccagtattaatgaaataggttccagtgatgaaaacattcaagcagaactaggtagaaacagagggccaaaattgaatgctatgcttagattaggggttttgcaacctgaggtctataaacaaagtcttcctggaagtaattgtaagcatcctgaaataaaaaagcaagaatatgaagaagtagttcagactgttaatacagatttctctccatatctgatttcagataacttagaacagcctatgggaagtagtcatgcatctcaggtttgttctgagacacctgatgacctgttagatgatggtgaaataaaggaagatactagttttgctgaaaatgacattaaggaaagttctgctgtttttagcaaaagcgtccagaaaggagagcttagcaggagtcctagccctttcacccatacacatttggctcagggttaccgaagaggggccaagaaattagagtcctcagaagagaacttatctagtgaggatgaagagcttccctgcttccaacacttgttatttggtaaagtaaacaatataccttctcagtctactaggcatagcaccgttgctaccgagtgtctgtctaagaacacagaggagaatttattatcattgaagaatagcttaaatgactgcagtaaccaggtaatattggcaaaggcatctcaggaacatcaccttagtgaggaaacaaaatgttctgctagcttgttttcttcacagtgcagtgaattggaagacttgactgcaaatacaaacacccaggatcctttcttgattggttcttccaaacaaatgaggcatcagtctgaaagccagggagttggtctgagtgacaaggaattggtttcagatgatgaagaaagaggaacgggcttggaagaaaataatcaagaagagcaaagcatggattcaaacttaggtgaagcagcatctgggtgtgagagtgaaacaagcgtctctgaagactgctcagggctatcctctcagagtgacattttaaccactcagcagagggataccatgcaacataacctgataaagctccagcaggaaatggctgaactagaagctgtgttagaacagcatgggagccagccttctaacagctacccttccatcataagtgactcttctgcccttgaggacctgcgaaatccagaacaaagcacatcagaaaaagcagtattaacttcacagaaaagtagtgaataccctataagccagaatccagaaggcctttctgctgacaagtttgaggtgtctgcagatagttctaccagtaaaaataaagaaccaggagtggaaaggtcatccccttctaaatgcccatcattagatgataggtggtacatgcacagttgctctgggagtcttcagaatagaaactacccatctcaagaggagctcattaaggttgttgatgtggaggagcaacagctggaagagtctgggccacacgatttgacggaaacatcttacttgccaaggcaagatctagagggaaccccttacctggaatctggaatcagcctcttctctgatgaccctgaatctgatccttctgaagacagagccccagagtcagctcgtgttggcaacataccatcttcaacctctgcattgaaagttccccaattgaaagttgcagaatctgcccagagtccagctgctgctcatactactgatactgctgggtataatgcaatggaagaaagtgtgagcagggagaagccagaattgacagcttcaacagaaagggtcaacaaaagaatgtccatggtggtgtctggcctgaccccagaagaatttatgctcgtgtacaagtttgccagaaaacaccacatcactttaactaatctaattactgaagagactactcatgttgttatgaaaacagatgctgagtttgtgtgtgaacggacactgaaatattttctaggaattgcgggaggaaaatgggtagttagctatttctgggtgacccagtctattaaagaaagaaaaatgctgaatgagcatgattttgaagtcagaggagatgtggtcaatggaagaaaccaccaaggtccaaagcgagcaagagaatcccaggacagaaagatcttcagggggctagaaatctgttgctatgggcccttcaccaacatgcccacagatcaactggaatggatggtacagctgtgtggtgcttctgtggtgaaggagctttcatcattcacccttggcacaggtgtccacccaattgtggttgtgcagccagatgcctggacagaggacaatggcttccatgcaattgggcagatgtgtgaggcacctgtggtgacccgagagtgggtgttggacagtgtagcactctaccagtgccaggagctggacacctacctgataccccagatcccccacagccactac

SEQ ID NO: 181 - DNA, 10254 bp, Homo sapiens
  BRCA2
atgcctattggatccaaagagaggccaacattttttgaaatttttaagacacgctgcaacaaagcagatttaggaccaataagtcttaattggtttgaagaactttcttcagaagctccaccctataattctgaacctgcagaagaatctgaacataaaaacaacaattacgaaccaaacctatttaaaactccacaaaggaaaccatcttataatcagctggcttcaactccaataatattcaaagagcaagggctgactctgccgctgtaccaatctcctgtaaaagaattagataaattcaaattagacttaggaaggaatgttcccaatagtagacataaaagtcttcgcacagtgaaaactaaaatggatcaagcagatgatgtttcctgtccacttctaaattcttgtcttagtgaaagtcctgttgttctacaatgtacacatgtaacaccacaaagagataagtcagtggtatgtgggagtttgtttcatacaccaaagtttgtgaagggtcgtcagacaccaaaacatatttctgaaagtctaggagctgaggtggatcctgatatgtcttggtcaagttctttagctacaccacccacccttagttctactgtgctcatagtcagaaatgaagaagcatctgaaactgtatttcctcatgatactactgctaatgtgaaaagctatttttccaatcatgatgaaagtctgaagaaaaatgatagatttatcgcttctgtgacagacagtgaaaacacaaatcaaagagaagctgcaagtcatggatttggaaaaacatcagggaattcatttaaagtaaatagctgcaaagaccacattggaaagtcaatgccaaatgtcctagaagatgaagtatatgaaacagttgtagatacctctgaagaagatagtttttcattatgtttttctaaatgtagaacaaaaaatctacaaaaagtaagaactagcaagactaggaaaaaaattttccatgaagcaaacgctgatgaatgtgaaaaatctaaaaaccaagtgaaagaaaaatactcatttgtatctgaagtggaaccaaatgatactgatccattagattcaaatgtagcaaatcagaagccctttgagagtggaagtgacaaaatctccaaggaagttgtaccgtctttggcctgtgaatggtctcaactaaccctttcaggtctaaatggagcccagatggagaaaatacccctattgcatatttcttcatgtgaccaaaatatttcagaaaaagacctattagacacagagaacaaaagaaagaaagattttcttacttcagagaattctttgccacgtatttctagcctaccaaaatcagagaagccattaaatgaggaaacagtggtaaataagagagatgaagagcagcatcttgaatctcatacagactgcattcttgcagtaaagcaggcaatatctggaacttctccagtggcttcttcatttcagggtatcaaaaagtctatattcagaataagagaatcacctaaagagactttcaatgcaagtttttcaggtcatatgactgatccaaactttaaaaaagaaactgaagcctctgaaagtggactggaaatacatactgtttgctcacagaaggaggactccttatgtccaaatttaattgataatggaagctggccagccaccaccacacagaattctgtagctttgaagaatgcaggtttaatatccactttgaaaaagaaaacaaataagtttatttatgctatacatgatgaaacatcttataaaggaaaaaaaataccgaaagaccaaaaatcagaactaattaactgttcagcccagtttgaagcaaatgcttttgaagcaccacttacatttgcaaatgctgattcaggtttattgcattcttctgtgaaaagaagctgttcacagaatgattctgaagaaccaactttgtccttaactagctcttttgggacaattctgaggaaatgttctagaaatgaaacatgttctaataatacagtaatctctcaggatcttgattataaagaagcaaaatgtaataaggaaaaactacagttatttattaccccagaagctgattctctgtcatgcctgcaggaaggacagtgtgaaaatgatccaaaaagcaaaaaagtttcagatataaaagaagaggtcttggctgcagcatgtcacccagtacaacattcaaaagtggaatacagtgatactgactttcaatcccagaaaagtcttttatatgatcatgaaaatgccagcactcttattttaactcctacttccaaggatgttctgtcaaacctagtcatgatttctagaggcaaagaatcatacaaaatgtcagacaagctcaaaggtaacaattatgaatctgatgttgaattaaccaaaaatattcccatggaaaagaatcaagatgtatgtgctttaaatgaaaattataaaaacgttgagctgttgccacctgaaaaatacatgagagtagcatcaccttcaagaaaggtacaattcaaccaaaacacaaatctaagagtaatccaaaaaaatcaagaagaaactacttcaatttcaaaaataactgtcaatccagactctgaagaacttttctcagacaatgagaataattttgtcttccaagtagctaatgaaaggaataatcttgctttaggaaatactaaggaacttcatgaaacagacttgacttgtgtaaacgaacccattttcaagaactctaccatggttttatatggagacacaggtgataaacaagcaacccaagtgtcaattaaaaaagatttggtttatgttcttgcagaggagaacaaaaatagtgtaaagcagcatataaaaatgactctaggtcaagatttaaaatcggacatctccttgaatatagataaaataccagaaaaaaataatgattacatgaacaaatgggcaggactcttaggtccaatttcaaatcacagttttggaggtagcttcagaacagcttcaaataaggaaatcaagctctctgaacataacattaagaagagcaaaatgttcttcaaagatattgaagaacaatatcctactagtttagcttgtgttgaaattgtaaataccttggcattagataatcaaaagaaactgagcaagcctcagtcaattaatactgtatctgcacatttacagagtagtgtagttgtttctgattgtaaaaatagtcatataacccctcagatgttattttccaagcaggattttaattcaaaccataatttaacacctagccaaaaggcagaaattacagaactttctactatattagaagaatcaggaagtcagtttgaatttactcagtttagaaaaccaagctacatattgcagaagagtacatttgaagtgcctgaaaaccagatgactatcttaaagaccacttctgaggaatgcagagatgctgatcttcatgtcataatgaatgccccatcgattggtcaggtagacagcagcaagcaatttgaaggtacagttgaaattaaacggaagtttgctggcctgttgaaaaatgactgtaacaaaagtgcttctggttatttaacagatgaaaatgaagtggggtttaggggcttttattctgctcatggcacaaaactgaatgtttctactgaagctctgcaaaaagctgtgaaactgtttagtgatattgagaatattagtgaggaaacttctgcagaggtacatccaataagtttatcttcaagtaaatgtcatgattctgttgtttcaatgtttaagatagaaaatcataatgataaaactgtaagtgaaaaaaataataaatgccaactgatattacaaaataatattgaaatgactactggcacttttgttgaagaaattactgaaaattacaagagaaatactgaaaatgaagataacaaatatactgctgccagtagaaattctcataacttagaatttgatggcagtgattcaagtaaaaatgatactgtttgtattcataaagatgaaacggacttgctatttactgatcagcacaacatatgtcttaaattatctggccagtttatgaaggagggaaacactcagattaaagaagatttgtcagatttaacttttttggaagttgcgaaagctcaagaagcatgtcatggtaatacttcaaataaagaacagttaactgctactaaaacggagcaaaatataaaagattttgagacttctgatacattttttcagactgcaagtgggaaaaatattagtgtcgccaaagagtcatttaataaaattgtaaatttctttgatcagaaaccagaagaattgcataacttttccttaaattctgaattacattctgacataagaaagaacaaaatggacattctaagttatgaggaaacagacatagttaaacacaaaatactgaaagaaagtgtcccagttggtactggaaatcaactagtgaccttccagggacaacccgaacgtgatgaaaagatcaaagaacctactctattgggttttcatacagctagcgggaaaaaagttaaaattgcaaaggaatctttggacaaagtgaaaaacctttttgatgaaaaagagcaaggtactagtgaaatcaccagttttagccatcaatgggcaaagaccctaaagtacagagaggcctgtaaagaccttgaattagcatgtgagaccattgagatcacagctgccccaaagtgtaaagaaatgcagaattctctcaataatgataaaaaccttgtttctattgagactgtggtgccacctaagctcttaagtgataatttatgtagacaaactgaaaatctcaaaacatcaaaaagtatctttttgaaagttaaagtacatgaaaatgtagaaaaagaaacagcaaaaagtcctgcaacttgttacacaaatcagtccccttattcagtcattgaaaattcagccttagctttttacacaagttgtagtagaaaaacttctgtgagtcagacttcattacttgaagcaaaaaaatggcttagagaaggaatatttgatggtcaaccagaaagaataaatactgcagattatgtaggaaattatttgtatgaaaataattcaaacagtactatagctgaaaatgacaaaaatcatctctccgaaaaacaagatacttatttaagtaacagtagcatgtctaacagctattcctaccattctgatgaggtatataatgattcaggatatctctcaaaaaataaacttgattctggtattgagccagtattgaagaatgttgaagatcaaaaaaacactagtttttccaaagtaatatccaatgtaaaagatgcaaatgcatacccacaaactgtaaatgaagatatttgcgttgaggaacttgtgactagctcttcaccctgcaaaaataaaaatgcagccattaaattgtccatatctaatagtaataattttgaggtagggccacctgcatttaggatagccagtggtaaaatcgtttgtgtttcacatgaaacaattaaaaaagtgaaagacatatttacagacagtttcagtaaagtaattaaggaaaacaacgagaataaatcaaaaatttgccaaacgaaaattatggcaggttgttacgaggcattggatgattcagaggatattcttcataactctctagataatgatgaatgtagcacgcattcacataaggtttttgctgacattcagagtgaagaaattttacaacataaccaaaatatgtctggattggagaaagtttctaaaatatcaccttgtgatgttagtttggaaacttcagatatatgtaaatgtagtatagggaagcttcataagtcagtctcatctgcaaatacttgtgggatttttagcacagcaagtggaaaatctgtccaggtatcagatgcttcattacaaaacgcaagacaagtgttttctgaaatagaagatagtaccaagcaagtcttttccaaagtattgtttaaaagtaacgaacattcagaccagctcacaagagaagaaaatactgctatacgtactccagaacatttaatatcccaaaaaggcttttcatataatgtggtaaattcatctgctttctctggatttagtacagcaagtggaaagcaagtttccattttagaaagttccttacacaaagttaagggagtgttagaggaatttgatttaatcagaactgagcatagtcttcactattcacctacgtctagacaaaatgtatcaaaaatacttcctcgtgttgataagagaaacccagagcactgtgtaaactcagaaatggaaaaaacctgcagtaaagaatttaaattatcaaataacttaaatgttgaaggtggttcttcagaaaataatcactctattaaagtttctccatatctctctcaatttcaacaagacaaacaacagttggtattaggaaccaaagtgtcacttgttgagaacattcatgttttgggaaaagaacaggcttcacctaaaaacgtaaaaatggaaattggtaaaactgaaactttttctgatgttcctgtgaaaacaaatatagaagtttgttctacttactccaaagattcagaaaactactttgaaacagaagcagtagaaattgctaaagcttttatggaagatgatgaactgacagattctaaactgccaagtcatgccacacattctctttttacatgtcccgaaaatgaggaaatggttttgtcaaattcaagaattggaaaaagaagaggagagccccttatcttagtgggagaaccctcaatcaaaagaaacttattaaatgaatttgacaggataatagaaaatcaagaaaaatccttaaaggcttcaaaaagcactccagatggcacaataaaagatcgaagattgtttatgcatcatgtttctttagagccgattacctgtgtaccctttcgcacaactaaggaacgtcaagagatacagaatccaaattttaccgcacctggtcaagaatttctgtctaaatctcatttgtatgaacatctgactttggaaaaatcttcaagcaatttagcagtttcaggacatccattttatcaagtttctgctacaagaaatgaaaaaatgagacacttgattactacaggcagaccaaccaaagtctttgttccaccttttaaaactaaatcacattttcacagagttgaacagtgtgttaggaatattaacttggaggaaaacagacaaaagcaaaacattgatggacatggctctgatgatagtaaaaataagattaatgacaatgagattcatcagtttaacaaaaacaactccaatcaagcagcagctgtaactttcacaaagtgtgaagaagaacctttagatttaattacaagtcttcagaatgccagagatatacaggatatgcgaattaagaagaaacaaaggcaacgcgtctttccacagccaggcagtctgtatcttgcaaaaacatccactctgcctcgaatctctctgaaagcagcagtaggaggccaagttccctctgcgtgttctcataaacagctgtatacgtatggcgtttctaaacattgcataaaaattaacagcaaaaatgcagagtcttttcagtttcacactgaagattattttggtaaggaaagtttatggactggaaaaggaatacagttggctgatggtggatggctcataccctccaatgatggaaaggctggaaaagaagaattttatagggctctgtgtgacactccaggtgtggatccaaagcttatttctagaatttgggtttataatcactatagatggatcatatggaaactggcagctatggaatgtgcctttcctaaggaatttgctaatagatgcctaagcccagaaagggtgcttcttcaactaaaatacagatatgatacggaaattgatagaagcagaagatcggctataaaaaagataatggaaagggatgacacagctgcaaaaacacttgttctctgtgtttctgacataatttcattgagcgcaaatatatctgaaacttctagcaataaaactagtagtgcagatacccaaaaagtggccattattgaacttacagatgggtggtatgctgttaaggcccagttagatcctcccctcttagctgtcttaaagaatggcagactgacagttggtcagaagattattcttcatggagcagaactggtgggctctcctgatgcctgtacacctcttgaagccccagaatctcttatgttaaagatttctgctaacagtactcggcctgctcgctggtataccaaacttggattctttcctgaccctagaccttttcctctgcccttatcatcgcttttcagtgatggaggaaatgttggttgtgttgatgtaattattcaaagagcataccctatacagtggatggagaagacatcatctggattatacatatttcgcaatgaaagagaggaagaaaaggaagcagcaaaatatgtggaggcccaacaaaagagactagaagccttattcactaaaattcaggaggaatttgaagaacatgaagaaaacacaacaaaaccatatttaccatcacgtgcactaacaagacagcaagttcgtgctttgcaagatggtgcagagctttatgaagcagtgaagaatgcagcagacccagcttaccttgagggttatttcagtgaagagcagttaagagccttgaataatcacaggcaaatgttgaatgataagaaacaagctcagatccagttggaaattaggaaggccatggaatctgctgaacaaaaggaacaaggtttatcaagggatgtcacaaccgtgtggaagttgcgtattgtaagctattcaaaaaaagaaaaagattcagttatactgagtatttggcgtccatcatcagatttatattctctgttaacagaaggaaagagatacagaatttatcatcttgcaacttcaaaatctaaaagtaaatctgaaagagctaacatacagttagcagcgacaaaaaaaactcagtatcaacaactaccggtttcagatgaaattttatttcagatttaccagccacgggagccccttcacttcagcaaatttttagatccagactttcagccatcttgttctgaggtggacctaataggatttgtcgtttctgttgtgaaaaaaacaggacttgcccctttcgtctatttgtcagacgaatgttacaatttactggcaataaagttttggatagaccttaatgaggacattattaagcctcatatgttaattgctgcaagcaacctccagtggcgaccagaatccaaatcaggccttcttactttatttgctggagatttttctgtgttttctgctagtccaaaagagggccactttcaagagacattcaacaaaatgaaaaatactgttgagaatattgacatactttgcaatgaagcagaaaacaagcttatgcatatactgcatgcaaatgatcccaagtggtccaccccaactaaagactgtacttcagggccgtacactgctcaaatcattcctggtacaggaaacaagcttctgatgtcttctcctaattgtgagatatattatcaaagtcctttatcactttgtatggccaaaaggaagtctgtttccacacctgtctcagcccagatgacttcaaagtcttgtaaaggggagaaagagattgatgaccaaaagaactgcaaaaagagaagagccttggatttcttgagtagactgcctttacctccacctgttagtcccatttgtacatttgtttctccggctgcacagaaggcatttcagccaccaaggagttgtggcaccaaatacgaaacacccataaagaaaaaagaactgaattctcctcagatgactccatttaaaaaattcaatgaaatttctcttttggaaagtaattcaatagctgacgaagaacttgcattgataaatacccaagctcttttgtctggttcaacaggagaaaaacaatttatatctgtcagtgaatccactaggactgctcccaccagttcagaagattatctcagactgaaacgacgttgtactacatctctgatcaaagaacaggagagttcccaggccagtacggaagaatgtgagaaaaataagcaggacacaattacaactaaaaaatatatc

SEQ ID NO: 182 - DNA, 2487 bp, Homo sapiens
  MCC
atgaattccggagttgccatgaaatatggaaacgactcctcggccgagctgagtgagctccattcagcagccctggcatcactaaagggagatatagtggaacttaataaacgtctccagcaaacagagagggaacgggaccttctggaaaagaaattggccaaggcacagtgcgagcagtcccacctcatgagagagcatgaggatgtccaggagcgaacgacgcttcgctatgaggaacgcatcacagagctccacagcgtcattgcggagctcaacaagaagatagaccgtctgcaaggcaccaccatcagggaggaagatgagtactcagaactgcgatcagaactcagccagagccaacacgaggtcaacgaggactctcgaagcatggaccaagaccagacctctgtctctatccccgaaaaccagtctaccatggttactgctgacatggacaactgcagtgacctgaactcagaactgcagagggtgctgacagggctggagaatgttgtctgcggcaggaagaagagcagctgcagcctctccgtggccgaggtggacaggcacattgagcagctcaccacagccagcgagcactgtgacctggctattaagacagtcgaggagattgagggggtgcttggccgggacctgtatcccaacctggctgaagagaggtctcggtgggagaaggagctggctgggctgagggaagagaatgagagcctgactgccatgctgtgcagcaaagaggaagaactgaaccggactaaggccaccatgaatgccatccgggaagagcgggaccggctccggaggcgggtcagagagcttcaaactcgactacagagcgtgcaggccacaggtccctccagccctggccgcctcacttccaccaaccgcccgattaaccccagcactggggagctgagcacaagcagcagcagcaatgacattcccatcgccaagattgctgagagggtgaagctatcaaagacaaggtccgaatcgtcatcatctgatcggccagtcctgggctcagaaatcagtagcataggggtatccagcagtgtggctgaacacctggcccactcacttcaggactgctccaatatccaagagattttccaaacactctactcacacggatctgccatctcagaaagcaagattagagagtttgaggtggaaacagaacggctgaatagccggattgagcacctcaaatcccaaaatgacctcctgaccataaccttggaggaatgtaaaagcaatgctgagaggatgagcatgctggtgggaaaatacgaatccaatgccacagcgctgaggctggccttgcagtacagcgagcagtgcatcgaagcctacgaactcctcctggcgctggcagagagtgagcagagcctcatcctggggcagttccgagcggcgggcgtggggtcctcccctggagaccagtcgggggatgaaaacatcactcagatgctcaagcgagctcatgactgccggaagacagctgagaacgctgccaaggccctgctcatgaagctggacggcagctgtgggggagcctttgccgtggccggctgcagcgtgcagccctgggagagcctttcctccaacagccacaccagcacaaccagctccacagccagtagttgcgacaccgagttcactaaagaagacgagcagaggctgaaggattatatccagcagctcaagaatgacagggctgcggtcaagctgaccatgctggagctggaaagcatccacatcgatcctctcagctatgacgtcaagcctcggggagacagccagaggctggatctggaaaacgcagtgcttatgcaggagctcatggccatgaaggaggagatggccgagttgaaggcccagctctacctactggagaaagagaagaaggccctggagctgaagctgagcacgcgggaggcccaggagcaggcctacctggtgcacattgagcacctgaagtccgaggtggaggagcagaaggagcagcggatgcgatccctcagctccaccagcagcggcagcaaagataaacctggcaaggagtgtgctgatgctgcctccccagctctgtccctagctgaactcaggacaacgtgcagcgagaatgagctggctgcggagttcaccaacgccattcgtcgagaaaagaagttgaaggccagagttcaagagctggtgagtgccttggagagactcaccaagagcagtgaaatccgacatcagcaatctgcagagttcgtgaatgatctaaagcgggccaacagcaacctggtggctgcctatgagaaagcaaagaaaaagcatcaaaacaaactgaagaagttagagtcgcagatgatggccatggtggagagacatgagacccaagtgaggatgctcaagcaaagaatagctctgctagaggaggagaactccaggccacacaccaatgaaacttcgctt

SEQ ID NO: 183 - DNA, 2253 bp, Homo sapiens
  EZH2, isoform 1
atgggccagactgggaagaaatctgagaagggaccagtttgttggcggaagcgtgtaaaatcagagtacatgcgactgagacagctcaagaggttcagacgagctgatgaagtaaagagtatgtttagttccaatcgtcagaaaattttggaaagaacggaaatcttaaaccaagaatggaaacagcgaaggatacagcctgtgcacatcctgacttctgtgagctcattgcgcgggactagggagtgttcggtgaccagtgacttggattttccaacacaagtcatcccattaaagactctgaatgcagttgcttcagtacccataatgtattcttggtctcccctacagcagaattttatggtggaagatgaaactgttttacataacattccttatatgggagatgaagttttagatcaggatggtactttcattgaagaactaataaaaaattatgatgggaaagtacacggggatagagaatgtgggtttataaatgatgaaatttttgtggagttggtgaatgcccttggtcaatataatgatgatgacgatgatgatgatggagacgatcctgaagaaagagaagaaaagcagaaagatctggaggatcaccgagatgataaagaaagccgcccacctcggaaatttccttctgataaaatttttgaagccatttcctcaatgtttccagataagggcacagcagaagaactaaaggaaaaatataaagaactcaccgaacagcagctcccaggcgcacttcctcctgaatgtacccccaacatagatggaccaaatgctaaatctgttcagagagagcaaagcttacactcctttcatacgcttttctgtaggcgatgttttaaatatgactgcttcctacatcgtaagtgcaattattcttttcatgcaacacccaacacttataagcggaagaacacagaaacagctctagacaacaaaccttgtggaccacagtgttaccagcatttggagggagcaaaggagtttgctgctgctctcaccgctgagcggataaagaccccaccaaaacgtccaggaggccgcagaagaggacggcttcccaataacagtagcaggcccagcacccccaccattaatgtgctggaatcaaaggatacagacagtgatagggaagcagggactgaaacggggggagagaacaatgataaagaagaagaagagaagaaagatgaaacttcgagctcctctgaagcaaattctcggtgtcaaacaccaataaagatgaagccaaatattgaacctcctgagaatgtggagtggagtggtgctgaagcctcaatgtttagagtcctcattggcacttactatgacaatttctgtgccattgctaggttaattgggaccaaaacatgtagacaggtgtatgagtttagagtcaaagaatctagcatcatagctccagctcccgctgaggatgtggatactcctccaaggaaaaagaagaggaaacaccggttgtgggctgcacactgcagaaagatacagctgaaaaaggacggctcctctaaccatgtttacaactatcaaccctgtgatcatccacggcagccttgtgacagttcgtgcccttgtgtgatagcacaaaatttttgtgaaaagttttgtcaatgtagttcagagtgtcaaaaccgctttccgggatgccgctgcaaagcacagtgcaacaccaagcagtgcccgtgctacctggctgtccgagagtgtgaccctgacctctgtcttacttgtggagccgctgaccattgggacagtaaaaatgtgtcctgcaagaactgcagtattcagcggggctccaaaaagcatctattgctggcaccatctgacgtggcaggctgggggatttttatcaaagatcctgtgcagaaaaatgaattcatctcagaatactgtggagagattatttctcaagatgaagctgacagaagagggaaagtgtatgataaatacatgtgcagctttctgttcaacttgaacaatgattttgtggtggatgcaacccgcaagggtaacaaaattcgttttgcaaatcattcggtaaatccaaactgctatgcaaaagttatgatggttaacggtgatcacaggataggtatttttgccaagagagccatccagactggcgaagagctgttttttgattacagatacagccaggctgatgccctgaagtatgtcggcatcgaaagagaaatggaaatccct

SEQ ID NO: 184 - DNA, 1053 bp, Homo sapiens
  NIPP1/PPP1R8, isoform alpha
atggcggcagccgcgaactccggctctagcctcccgctgttcgactgcccaacctgggcaggtaagccccctcccggtttacatctggatgtagtcaaaggagacaaactaattgagaaactgattattgatgagaagaagtattacttatttgggagaaaccctgatttgtgtgactttaccattgaccaccagtcttgctctcgggtccatgctgcacttgtctaccacaagcatctgaagagagttttcctgatagatctcaacagtacacacggcactttcttgggtcacattcggttggaacctcacaagcctcagcaaattcccatcgattccacggtctcatttggcgcatccacaagggcatacactctgcgcgagaagcctcagacattgccatcggctgtgaaaggagatgagaagatgggtggagaggatgatgaactcaagggcttactggggcttccagaggaggaaactgagcttgataacctgacagagttcaacactgcccacaacaagcggatttctacccttaccattgaggagggaaatctggacattcaaagaccaaagaggaagaggaagaactcacgggtgacattcagtgaggatgatgagatcatcaacccagaggatgtggatccctcagttggtcgattcaggaacatggtgcaaactgcagtggtcccagtcaagaagaagcgtgtggagggccctggctccctgggcctggaggaatcagggagcaggcgcatgcagaactttgccttcagcggaggactctacgggggcctgccccccacacacagtgaagcaggctcccagccacatggcatccatgggacagcactcatcggtggcttgcccatgccatacccaaaccttgcccctgatgtggacttgactcctgttgtgccgtcagcagtgaacatgaaccctgcaccaaaccctgcagtctataaccctgaagctgtaaatgaacccaagaagaagaaatatgcaaaagaggcttggccaggcaagaagcccacaccttccttgctgatt

SEQ ID NO: 185 - DNA, 990 bp, Homo sapiens
  PPP1CA, isoform 1
atgtccgacagcgagaagctcaacctggactcgatcatcgggcgcctgctggaagtgcagggctcgcggcctggcaagaatgtacagctgacagagaacgagatccgcggtctgtgcctgaaatcccgggagatttttctgagccagcccattcttctggagctggaggcacccctcaagatctgcggtgacatacacggccagtactacgaccttctgcgactatttgagtatggcggtttccctcccgagagcaactacctctttctgggggactatgtggacaggggcaagcagtccttggagaccatctgcctgctgctggcctataagatcaagtaccccgagaacttcttcctgctccgtgggaaccacgagtgtgccagcatcaaccgcatctatggtttctacgatgagtgcaagagacgctacaacatcaaactgtggaaaaccttcactgactgcttcaactgcctgcccatcgcggccatagtggacgaaaagatcttctgctgccacggaggcctgtccccggacctgcagtctatggagcagattcggcggatcatgcggcccacagatgtgcctgaccagggcctgctgtgtgacctgctgtggtctgaccctgacaaggacgtgcagggctggggcgagaacgaccgtggcgtctcttttacctttggagccgaggtggtggccaagttcctccacaagcacgacttggacctcatctgccgagcacaccaggtggtagaagacggctacgagttctttgccaagcggcagctggtgacacttttctcagctcccaactactgtggcgagtttgacaatgctggcgccatgatgagtgtggacgagaccctcatgtgctctttccagatcctcaagcccgccgacaagaacaaggggaagtacgggcagttcagtggcctgaaccctggaggccgacccatcaccccaccccgcaattccgccaaagccaagaaa

SEQ ID NO: 186 - DNA, 1818 bp, Homo sapiens
  TAK1/MAP3K7, isoform 1B
atgtctacagcctctgccgcctcctcctcctcctcgtcttcggccggtgagatgatcgaagccccttcccaggtcctcaactttgaagagatcgactacaaggagatcgaggtggaagaggttgttggaagaggagcctttggagttgtttgcaaagctaagtggagagcaaaagatgttgctattaaacaaatagaaagtgaatctgagaggaaagcgtttattgtagagcttcggcagttatcccgtgtgaaccatcctaatattgtaaagctttatggagcctgcttgaatccagtgtgtcttgtgatggaatatgctgaagggggctctttatataatgtgctgcatggtgctgaaccattgccatattatactgctgcccacgcaatgagttggtgtttacagtgttcccaaggagtggcttatcttcacagcatgcaacccaaagcgctaattcacagggacctgaaaccaccaaacttactgctggttgcaggggggacagttctaaaaatttgtgattttggtacagcctgtgacattcagacacacatgaccaataacaaggggagtgctgcttggatggcacctgaagtttttgaaggtagtaattacagtgaaaaatgtgacgtcttcagctggggtattattctttgggaagtgataacgcgtcggaaaccctttgatgagattggtggcccagctttccgaatcatgtgggctgttcataatggtactcgaccaccactgataaaaaatttacctaagcccattgagagcctgatgactcgttgttggtctaaagatccttcccagcgcccttcaatggaggaaattgtgaaaataatgactcacttgatgcggtactttccaggagcagatgagccattacagtatccttgtcagtattcagatgaaggacagagcaactctgccaccagtacaggctcattcatggacattgcttctacaaatacgagtaacaaaagtgacactaatatggagcaagttcctgccacaaatgatactattaagcgcttagaatcaaaattgttgaaaaatcaggcaaagcaacagagtgaatctggacgtttaagcttgggagcctcccgtgggagcagtgtggagagcttgcccccaacctctgagggcaagaggatgagtgctgacatgtctgaaatagaagctaggatcgccgcaaccacagcctattccaagcctaaacggggccaccgtaaaactgcttcatttggcaacattctggatgtccctgagatcgtcatatcaggcaacggacagccaagacgtagatccatccaagacttgactgtaactggaacagaacctggtcaggtgagcagtaggtcatccagtcccagtgtcagaatgattactacctcaggaccaacctcagaaaagccaactcgaagtcatccatggacccctgatgattccacagataccaatggatcagataactccatcccaatggcttatcttacactggatcaccaactacagcctctagcaccgtgcccaaactccaaagaatctatggcagtgtttgaacagcattgtaaaatggcacaagaatatatgaaagttcaaacagaaattgcattgttattacagagaaagcaagaactagttgcagaactggaccaggatgaaaaggaccagcaaaatacatctcgcctggtacaggaacataaaaagcttttagatgaaaacaaaagcctttctacttactaccagcaatgcaaaaaacaactagaggtcatcagaagtcagcagcagaaacgacaaggcacttca

SEQ ID NO: 187 - DNA, 204 bp, Unknown
  CMV promoter
gtgatgcggttttggcagtacatcaatgggcgtggatagcggtttgactcacggggatttccaagtctccaccccattgacgtcaatgggagtttgttttggcaccaaaatcaacgggactttccaaaatgtcgtaacaactccgccccattgacgcaaatgggcggtaggcgtgtacggtgggaggtctatataagcagagct

SEQ ID NO: 188 - DNA, 1212 bp, Homo sapiens
  Caspase-1, isoform alpha
atggccgacaaggtcctgaaggagaagagaaagctgtttatccgttccatgggtgaaggtacaataaatggcttactggatgaattattacagacaagggtgctgaacaaggaagagatggagaaagtaaaacgtgaaaatgctacagttatggataagacccgagctttgattgactccgttattccgaaaggggcacaggcatgccaaatttgcatcacatacatttgtgaagaagacagttacctggcagggacgctgggactctcagcagatcaaacatctggaaattaccttaatatgcaagactctcaaggagtactttcttcctttccagctcctcaggcagtgcaggacaacccagctatgcccacatcctcaggctcagaagggaatgtcaagctttgctccctagaagaagctcaaaggatatggaaacaaaagtcggcagagatttatccaataatggacaagtcaagccgcacacgtcttgctctcattatctgcaatgaagaatttgacagtattcctagaagaactggagctgaggttgacatcacaggcatgacaatgctgctacaaaatctggggtacagcgtagatgtgaaaaaaaatctcactgcttcggacatgactacagagctggaggcatttgcacaccgcccagagcacaagacctctgacagcacgttcctggtgttcatgtctcatggtattcgggaaggcatttgtgggaagaaacactctgagcaagtcccagatatactacaactcaatgcaatctttaacatgttgaataccaagaactgcccaagtttgaaggacaaaccgaaggtgatcatcatccaggcctgccgtggtgacagccctggtgtggtgtggtttaaagattcagtaggagtttctggaaacctatctttaccaactacagaagagtttgaggatgatgctattaagaaagcccacatagagaaggattttatcgctttctgctcttccacaccagataatgtttcttggagacatcccacaatgggctctgtttttattggaagactcattgaacatatgcaagaatatgcctgttcctgtgatgtggaggaaattttccgcaaggttcgattttcatttgagcagccagatggtagagcgcagatgcccaccactgaaagagtgactttgacaagatgtttctacctcttcccaggacat

SEQ ID NO: 189 - DNA, 885 bp, Homo sapiens
  cyclin-D1/CCND1
atggaacaccagctcctgtgctgcgaagtggaaaccatccgccgcgcgtaccccgatgccaacctcctcaacgaccgggtgctgcgggccatgctgaaggcggaggagacctgcgcgccctcggtgtcctacttcaaatgtgtgcagaaggaggtcctgccgtccatgcggaagatcgtcgccacctggatgctggaggtctgcgaggaacagaagtgcgaggaggaggtcttcccgctggccatgaactacctggaccgcttcctgtcgctggagcccgtgaaaaagagccgcctgcagctgctgggggccacttgcatgttcgtggcctctaagatgaaggagaccatccccctgacggccgagaagctgtgcatctacaccgacaactccatccggcccgaggagctgctgcaaatggagctgctcctggtgaacaagctcaagtggaacctggccgcaatgaccccgcacgatttcattgaacacttcctctccaaaatgccagaggcggaggagaacaaacagatcatccgcaaacacgcgcagaccttcgttgccctctgtgccacagatgtgaagttcatttccaatccgccctccatggtggcagcggggagcgtggtggccgcagtgcaaggcctgaacctgaggagccccaacaacttcctgtcctactaccgcctcacacgcttcctctccagagtgatcaagtgtgacccggactgcctccgggcctgccaggagcagatcgaagccctgctggagtcaagcctgcgccaggcccagcagaacatggaccccaaggccgccgaggaggaggaagaggaggaggaggaggtggacctggcttgcacacccaccgacgtgcgggacgtggacatc

SEQ ID NO: 190 - DNA, 996 bp, Homo sapiens
  A2b receptor (ADORA2B)
atgctgctggagacacaggacgcgctgtacgtggcgctggagctggtcatcgccgcgctttcggtggcgggcaacgtgctggtgtgcgccgcggtgggcacggcgaacactctgcagacgcccaccaactacttcctggtgtccctggctgcggccgacgtggccgtggggctcttcgccatcccctttgccatcaccatcagcctgggcttctgcactgacttctacggctgcctcttcctcgcctgcttcgtgctggtgctcacgcagagctccatcttcagccttctggccgtggcagtcgacagatacctggccatctgtgtcccgctcaggtataaaagtttggtcacggggacccgagcaagaggggtcattgctgtcctctgggtccttgcctttggcatcggattgactccattcctggggtggaacagtaaagacagtgccaccaacaactgcacagaaccctgggatggaaccacgaatgaaagctgctgccttgtgaagtgtctctttgagaatgtggtccccatgagctacatggtatatttcaatttctttgggtgtgttctgcccccactgcttataatgctggtgatctacattaagatcttcctggtggcctgcaggcagcttcagcgcactgagctgatggaccactcgaggaccaccctccagcgggagatccatgcagccaagtcactggccatgattgtggggatttttgccctgtgctggttacctgtgcatgctgttaactgtgtcactcttttccagccagctcagggtaaaaataagcccaagtgggcaatgaatatggccattcttctgtcacatgccaattcagttgtcaatcccattgtctatgcttaccggaaccgagacttccgctacacttttcacaaaattatctccaggtatcttctctgccaagcagatgtcaagagtgggaatggtcaggctggggtacagcctgctctcggtgtgggccta

SEQ ID NO: 191 - DNA, 1242 bp, Homo sapiens
  HHLA2, isoform 1
atgaaggcacagacagcactgtctttcttcctcattctcataacatctctgagtggatctcaaggcatattccctttggctttcttcatttatgttcctatgaatgaacaaatcgtcattggaagacttgatgaagatataattctcccttcttcatttgagaggggatccgaagtcgtaatacactggaagtatcaagatagctataaggttcacagttactacaaaggcagtgaccatttggaaagccaagatcccagatatgcaaacaggacatcccttttctataatgagattcaaaatgggaatgcgtcgctatttttcagaagagtaagccttctggacgaaggaatttacacctgctatgtaggaacagcaattcaagtgattacaaacaaagtggtgctaaaggtgggagtttttctcacacccgtgatgaagtatgaaaagaggaacacaaacagcttcttaatatgcagcgtgttaagtgtttatcctcgtccaattatcacgtggaaaatggacaacacacctatctctgaaaacaacatggaagaaacagggtctttggattctttttctattaacagcccactgaatattacaggatcaaattcatcttatgaatgtacaattgaaaattcactgctgaagcaaacatggacagggcgctggacgatgaaagatggccttcataaaatgcaaagtgaacacgtttcactctcatgtcaacctgtaaatgattatttttcaccaaaccaagacttcaaagttacttggtccagaatgaaaagtgggactttctctgtcctggcttactatctgagctcctcacaaaatacaattatcaatgaatcccgattctcatggaacaaagagctgataaaccagagtgacttctctatgaatttgatggatcttaatctttcagacagtggggaatatttatgcaatatttcttcggatgaatatactttacttaccatccacacagtgcatgtagaaccgagccaagaaacagcttcccataacaaaggcttatggattttggtgccctctgcgattttggcagcttttctgctgatttggagcgtaaaatgttgcagagcccagctagaagccaggaggagcagacaccctgctgatggagcccaacaagaaagatgttgtgtccctcctggtgagcgctgtcccagtgcacccgataatggcgaagaaaatgtgcctctttcaggaaaagta

SEQ ID NO: 192 - DNA, 1128 bp, Herpes simplex
  herpes simplex virus thymidine kinase (HSV-TK)
atggcttcgtacccctgccatcaacacgcgtctgcgttcgaccaggctgcgcgttctcgcggccatagcaaccgacgtacggcgttgcgccctcgccggcagcaagaagccacggaagtccgcctggagcagaaaatgcccacgctactgcgggtttatatagacggtcctcacgggatggggaaaaccaccaccacgcaactgctggtggccctgggttcgcgcgacgatatcgtctacgtacccgagccgatgacttactggcaggtgctgggggcttccgagacaatcgcgaacatctacaccacacaacaccgcctcgaccagggtgagatatcggccggggacgcggcggtggtaatgacaagcgcccagataacaatgggcatgccttatgccgtgaccgacgccgttctggctcctcatgtcgggggggaggctgggagttcacatgccccgcccccggccctcaccctcatcttcgaccgccatcccatcgccgccctcctgtgctacccggccgcgcgataccttatgggcagcatgaccccccaggccgtgctggcgttcgtggccctcatcccgccgaccttgcccggcacaaacatcgtgttgggggcccttccggaggacagacacatcgaccgcctggccaaacgccagcgccccggcgagcggcttgacctggctatgctggccgcgattcgccgcgtttacgggctgcttgccaatacggtgcggtatctgcagggcggcgggtcgtggtgggaggattggggacagctttcggggacggccgtgccgccccagggtgccgagccccagagcaacgcgggcccacgaccccatatcggggacacgttatttaccctgtttcgggcccccgagttgctggcccccaacggcgacctgtataacgtgtttgcctgggccttggacgtcttggccaaacgcctccgtcccatgcacgtctttatcctggattacgaccaatcgcccgccggctgccgggacgccctgctgcaacttacctccgggatggtccagacccacgtcaccaccccaggctccataccgacgatctgcgacctggcgcgcacgtttgcccgggagatgggggaggctaac

SEQ ID NO: 193 - DNA, 1173 bp, Homo sapiens
  Human TGF-beta isoform 1
atgccgccctccgggctgcggctgctgccgctgctgctaccgctgctgtggctactggtgctgacgcctggccggccggccgcgggactatccacctgcaagactatcgacatggagctggtgaagcggaagcgcatcgaggccatccgcggccagatcctgtccaagctgcggctcgccagccccccgagccagggggaggtgccgcccggcccgctgcccgaggccgtgctcgccctgtacaacagcacccgcgaccgggtggccggggagagtgcagaaccggagcccgagcctgaggccgactactacgccaaggaggtcacccgcgtgctaatggtggaaacccacaacgaaatctatgacaagttcaagcagagtacacacagcatatatatgttcttcaacacatcagagctccgagaagcggtacctgaacccgtgttgctctcccgggcagagctgcgtctgctgaggctcaagttaaaagtggagcagcacgtggagctgtaccagaaatacagcaacaattcctggcgatacctcagcaaccggctgctggcacccagcgactcgccagagtggttatcttttgatgtcaccggagttgtgcggcagtggttgagccgtggaggggaaattgagggctttcgccttagcgcccactgctcctgtgacagcagggataacacactgcaagtggacatcaacgggttcactaccggccgccgaggtgacctggccaccattcatggcatgaaccggcctttcctgcttctcatggccaccccgctggagagggcccagcatctgcaaagctcccggcaccgccgagccctggacaccaactattgcttcagctccacggagaagaactgctgcgtgcggcagctgtacattgacttccgcaaggacctcggctggaagtggatccacgagcccaagggctaccatgccaacttctgcctcgggccctgcccctacatttggagcctggacacgcagtacagcaaggtcctggccctgtacaaccagcataacccgggcgcctcggcggcgccgtgctgcgtgccgcaggcgctggagccgctgcccatcgtgtactacgtgggccgcaagcccaaggtggagcagctgtccaacatgatcgtgcgctcctgcaagtgcagctga

SEQ ID NO: 194 - DNA, 699 bp, Homo sapiens
  Human VEGF
atgaactttctgctgtcttgggtgcattggagccttgccttgctgctctacctccaccatgccaagtggtcccaggctgcacccatggcagaaggaggagggcagaatcatcacgaagtggtgaagttcatggatgtctatcagcgcagctactgccatccaatcgagaccctggtggacatcttccaggagtaccctgatgagatcgagtacatcttcaagccatcctgtgtgcccctgatgcgatgcgggggctgctgcaatgacgagggcctggagtgtgtgcccactgaggagtccaacatcaccatgcagattatgcggatcaaacctcaccaaggccagcacataggagagatgagcttcctacagcacaacaaatgtgaatgcagaccaaagaaagatagagcaagacaagaaaaaaaatcagttcgaggaaagggaaaggggcaaaaacgaaagcgcaagaaatcccggtataagtcctggagcgtgtacgttggtgcccgctgctgtctaatgccctggagcctccctggcccccatccctgtgggccttgctcagagcggagaaagcatttgtttgtacaagatccgcagacgtgtaaatgttcctgcaaaaacacagactcgcgttgcaaggcgaggcagcttgagttaaacgaacgtacttgcagatgtgacaagccgaggcggtga

SEQ ID NO: 195 - DNA, 19 bp, Homo sapiens
  Human TGF-beta isoform 1 shRNA target 1
gaaacccacaacgaaatct

SEQ ID NO: 196 - DNA, 19 bp, Homo sapiens
  Human TGF-beta isoform1 shRNA target 2
gtacacacagcatatatat

SEQ ID NO: 197 - DNA, 19 bp, Homo sapiens
  Human TGF-beta isoform1 shRNA target 3
ctgctgaggctcaagttaa

SEQ ID NO: 198 - DNA, 19 bp, Homo sapiens
  Human TGF-beta isoform1 shRNA target 4
gtggagctgtaccagaaat

SEQ ID NO: 199 - DNA, 19 bp, Homo sapiens
  Human TGF-beta isoform1 shRNA target 5
gactcgccagagtggttat

SEQ ID NO: 200 - DNA, 19 bp, Homo sapiens
  Human TGF-beta isoform1 shRNA target 6
gagccgtggaggggaaatt

SEQ ID NO: 201 - DNA, 19 bp, Homo sapiens
  Human TGF-beta isoform1 shRNA target 7
cctgtgacagcagggataa

SEQ ID NO: 202 - DNA, 19 bp, Homo sapiens
  Human TGF-beta isoform1 shRNA target 8
gccctggacaccaactatt

SEQ ID NO: 203 - DNA, 19 bp, Homo sapiens
  Human TGF-beta isoform1 shRNA target 9
ccctgtacaaccagcataa

SEQ ID NO: 204 - DNA, 19 bp, Homo sapiens
  Human VEGF shRNA target 1
gagatcgagtacatcttca

SEQ ID NO: 205 - DNA, 19 bp, Homo sapiens
  Human VEGF shRNA target 2
gcagattatgcggatcaaa

SEQ ID NO: 206 - DNA, 19 bp, Homo sapiens
  Human VEGF shRNA target 3
gatagagcaagacaagaaa

SEQ ID NO: 207 - DNA, 19 bp, Homo sapiens
  Human VEGF shRNA target 4
ggagaaagcatttgtttgt

SEQ ID NO: 208 - DNA, 19 bp, Homo sapiens
  Human VEGF shRNA target 5
gatccgcagacgtgtaaat

SEQ ID NO: 209 - DNA, 19 bp, Homo sapiens
  Human VEGF shRNA target 6
gcgaggcagcttgagttaa

SEQ ID NO: 210 - DNA, 3888 bp, Artificial Sequence
  ARI-134
ctttcctgcgttatcccctgattctgtggataaccgtattaccgcctttgagtgagctgataccgctcgccgcagccgaacgaccgagcgcagcgagtcagtgagcgaggaagcggaagagcgcccaatacgcaaaccgcctctccccgcgcgttggccgattcattaatgcagctggcacgacaggtttcccgactggaaagcgggcagtgagcgcaacgcaattaatacgcgtaccgctagccaggaagagtttgtagaaacgcaaaaaggccatccgtcaggatggccttctgcttagtttgatgcctggcagtttatggcgggcgtcctgcccgccaccctccgggccgttgcttcacaacgttcaaatccgctcccggcggatttgtcctactcaggagagcgttcaccgacaaacaacagataaaacgaaaggcccagtcttccgactgagcctttcgttttatttgatgcctggcagttccctactctcgcgttaacgctagcatggatgttttcccagtcacgacgttgtaaaacgacggccagtcttaagctcgggccccaaataatgattttattttgactgatagtgacctgttcgttgcaacaaattgatgagcaatgcttttttataatgccaactttgtacaaaaaagcaggctttaaaggaaccaattcagtcgagaattggtaccatatttgcatgtcgctatgtgttctgggaaatcaccataaacgtgaaatgtctttggatttgggaatcttataagttctgtatgagaccactccctaggccacactgtatggactattctagagatagtccatacagtgtggcttttttcgacagatctggcgcgccatagtggccagcggccgcaggtaagccagcccaggcctcgccctccagctcaaggcgggacaggtgccctagagtagcctgcatccagggacaggccccagccgggtgctgacacgtccacctccatctcttcctcaggtctgcccgggtggcatccctgtgacccctccccagtgcctctcctggccctggaagttgccactccagtgcccaccagccttgtcctaataaaattaagttgcatcattttgtctgactaggtgtccttctataatattatggggtggaggggggtggtatggagcaaggggcccaagttaacttgtttattgcagcttataatggttacaaataaagcaatagcatcacaaatttcacaaataaagcatttttttcactgcattctagttgtggtttgtccaaactcatcaatgtatcttatcatgtctggatccaaggtcgggcaggaagagggcctatttcccatgattccttcatatttgcatatacgatacaaggctgttagagagataattagaattaatttgactgtaaacacaaagatattagtacaaaatacgtgacgtagaaagtaataatttcttgggtagtttgcagttttaaaattatgttttaaaatggactatcatatgcttaccgtaacttgaaagtatttcgatttcttggctttatatatcttgtggaaaggacgaaactaggccgactacaagcgaattatctagagtaattcgcttgtagtcggcttttttcgagtagctagagaattcatggtaatagcgatgactaatacgtagatgtactgccaagtaggaaagtcccataaggtcatgtactgggcataatgccaggcgggccatttaccgtcattgacgtcaatagggggcgtacttggcatatgatacacttgatgtactgccaagtgggcagtttaccgtaaatagtccacccattgacgtcaatggaaagtccctattggcgttactatgggaacatacgtcattattgacgtcaatgggcgggggtcgttgggcggtcagccaggcgggccatttaccgtaagttatgtaacgcggaactccatatatgggctatgaactaatgaccccgtaattgattactattaataactagacccagctttcttgtacaaagttggcattataagaaagcattgcttatcaatttgttgcaacgaacaggtcactatcagtcaaaataaaatcattatttgccatccagctgatatcccctatagtgagtcgtattacatggtcatagctgtttcctggcagctctggcccgtgtctcaaaatctctgatgttacattgcacaagataaaaatatatcatcatgaacaataaaactgtctgcttacataaacagtaatacaaggggtgttatgagccatattcaacgggaaacgtcgaggccgcgattaaattccaacatggatgctgatttatatgggtataaatgggctcgcgataatgtcgggcaatcaggtgcgacaatctatcgcttgtatgggaagcccgatgcgccagagttgtttctgaaacatggcaaaggtagcgttgccaatgatgttacagatgagatggtcagactaaactggctgacggaatttatgcctcttccgaccatcaagcattttatccgtactcctgatgatgcatggttactcaccactgcgatccccggaaaaacagcattccaggtattagaagaatatcctgattcaggtgaaaatattgttgatgcgctggcagtgttcctgcgccggttgcattcgattcctgtttgtaattgtccttttaacagcgatcgcgtatttcgtctcgctcaggcgcaatcacgaatgaataacggtttggttgatgcgagtgattttgatgacgagcgtaatggctggcctgttgaacaagtctggaaagaaatgcataaacttttgccattctcaccggattcagtcgtcactcatggtgatttctcacttgataaccttatttttgacgaggggaaattaataggttgtattgatgttggacgagtcggaatcgcagaccgataccaggatcttgccatcctatggaactgcctcggtgagttttctccttcattacagaaacggctttttcaaaaatatggtattgataatcctgatatgaataaattgcagtttcatttgatgctcgatgagtttttctaatcagaattggttaattggttgtaacactggcagagcattacgctgacttgacgggacggcgcaagctcatgaccaaaatcccttaacgtgagttacgcgtcgttccactgagcgtcagaccccgtagaaaagatcaaaggatcttcttgagatcctttttttctgcgcgtaatctgctgcttgcaaacaaaaaaaccaccgctaccagcggtggtttgtttgccggatcaagagctaccaactctttttccgaaggtaactggcttcagcagagcgcagataccaaatactgtccttctagtgtagccgtagttaggccaccacttcaagaactctgtagcaccgcctacatacctcgctctgctaatcctgttaccagtggctgctgccagtggcgataagtcgtgtcttaccgggttggactcaagacgatagttaccggataaggcgcagcggtcgggctgaacggggggttcgtgcacacagcccagcttggagcgaacgacctacaccgaactgagatacctacagcgtgagcattgagaaagcgccacgcttcccgaagggagaaaggcggacaggtatccggtaagcggcagggtcggaacaggagagcgcacgagggagcttccagggggaaacgcctggtatctttatagtcctgtcgggtttcgccacctctgacttgagcgtcgatttttgtgatgctcgtcaggggggcggagcctatggaaaaacgccagcaacgcggcctttttacggttcctggccttttgctggccttttgct

SEQ ID NO: 211 - DNA, 3888 bp, Artificial Sequence
  ARI-135
ctttcctgcgttatcccctgattctgtggataaccgtattaccgcctttgagtgagctgataccgctcgccgcagccgaacgaccgagcgcagcgagtcagtgagcgaggaagcggaagagcgcccaatacgcaaaccgcctctccccgcgcgttggccgattcattaatgcagctggcacgacaggtttcccgactggaaagcgggcagtgagcgcaacgcaattaatacgcgtaccgctagccaggaagagtttgtagaaacgcaaaaaggccatccgtcaggatggccttctgcttagtttgatgcctggcagtttatggcgggcgtcctgcccgccaccctccgggccgttgcttcacaacgttcaaatccgctcccggcggatttgtcctactcaggagagcgttcaccgacaaacaacagataaaacgaaaggcccagtcttccgactgagcctttcgttttatttgatgcctggcagttccctactctcgcgttaacgctagcatggatgttttcccagtcacgacgttgtaaaacgacggccagtcttaagctcgggccccaaataatgattttattttgactgatagtgacctgttcgttgcaacaaattgatgagcaatgcttttttataatgccaactttgtacaaaaaagcaggctttaaaggaaccaattcagtcgagaattggtaccatatttgcatgtcgctatgtgttctgggaaatcaccataaacgtgaaatgtctttggatttgggaatcttataagttctgtatgagaccactccctaggagctggctcctggtgaattctagagattcaccaggagccagctcttttttcgacagatctggcgcgccatagtggccagcggccgcaggtaagccagcccaggcctcgccctccagctcaaggcgggacaggtgccctagagtagcctgcatccagggacaggccccagccgggtgctgacacgtccacctccatctcttcctcaggtctgcccgggtggcatccctgtgacccctccccagtgcctctcctggccctggaagttgccactccagtgcccaccagccttgtcctaataaaattaagttgcatcattttgtctgactaggtgtccttctataatattatggggtggaggggggtggtatggagcaaggggcccaagttaacttgtttattgcagcttataatggttacaaataaagcaatagcatcacaaatttcacaaataaagcatttttttcactgcattctagttgtggtttgtccaaactcatcaatgtatcttatcatgtctggatccaaggtcgggcaggaagagggcctatttcccatgattccttcatatttgcatatacgatacaaggctgttagagagataattagaattaatttgactgtaaacacaaagatattagtacaaaatacgtgacgtagaaagtaataatttcttgggtagtttgcagttttaaaattatgttttaaaatggactatcatatgcttaccgtaacttgaaagtatttcgatttcttggctttatatatcttgtggaaaggacgaaactaggccgactacaagcgaattatctagagtaattcgcttgtagtcggcttttttcgagtagctagagaattcatggtaatagcgatgactaatacgtagatgtactgccaagtaggaaagtcccataaggtcatgtactgggcataatgccaggcgggccatttaccgtcattgacgtcaatagggggcgtacttggcatatgatacacttgatgtactgccaagtgggcagtttaccgtaaatagtccacccattgacgtcaatggaaagtccctattggcgttactatgggaacatacgtcattattgacgtcaatgggcgggggtcgttgggcggtcagccaggcgggccatttaccgtaagttatgtaacgcggaactccatatatgggctatgaactaatgaccccgtaattgattactattaataactagacccagctttcttgtacaaagttggcattataagaaagcattgcttatcaatttgttgcaacgaacaggtcactatcagtcaaaataaaatcattatttgccatccagctgatatcccctatagtgagtcgtattacatggtcatagctgtttcctggcagctctggcccgtgtctcaaaatctctgatgttacattgcacaagataaaaatatatcatcatgaacaataaaactgtctgcttacataaacagtaatacaaggggtgttatgagccatattcaacgggaaacgtcgaggccgcgattaaattccaacatggatgctgatttatatgggtataaatgggctcgcgataatgtcgggcaatcaggtgcgacaatctatcgcttgtatgggaagcccgatgcgccagagttgtttctgaaacatggcaaaggtagcgttgccaatgatgttacagatgagatggtcagactaaactggctgacggaatttatgcctcttccgaccatcaagcattttatccgtactcctgatgatgcatggttactcaccactgcgatccccggaaaaacagcattccaggtattagaagaatatcctgattcaggtgaaaatattgttgatgcgctggcagtgttcctgcgccggttgcattcgattcctgtttgtaattgtccttttaacagcgatcgcgtatttcgtctcgctcaggcgcaatcacgaatgaataacggtttggttgatgcgagtgattttgatgacgagcgtaatggctggcctgttgaacaagtctggaaagaaatgcataaacttttgccattctcaccggattcagtcgtcactcatggtgatttctcacttgataaccttatttttgacgaggggaaattaataggttgtattgatgttggacgagtcggaatcgcagaccgataccaggatcttgccatcctatggaactgcctcggtgagttttctccttcattacagaaacggctttttcaaaaatatggtattgataatcctgatatgaataaattgcagtttcatttgatgctcgatgagtttttctaatcagaattggttaattggttgtaacactggcagagcattacgctgacttgacgggacggcgcaagctcatgaccaaaatcccttaacgtgagttacgcgtcgttccactgagcgtcagaccccgtagaaaagatcaaaggatcttcttgagatcctttttttctgcgcgtaatctgctgcttgcaaacaaaaaaaccaccgctaccagcggtggtttgtttgccggatcaagagctaccaactctttttccgaaggtaactggcttcagcagagcgcagataccaaatactgtccttctagtgtagccgtagttaggccaccacttcaagaactctgtagcaccgcctacatacctcgctctgctaatcctgttaccagtggctgctgccagtggcgataagtcgtgtcttaccgggttggactcaagacgatagttaccggataaggcgcagcggtcgggctgaacggggggttcgtgcacacagcccagcttggagcgaacgacctacaccgaactgagatacctacagcgtgagcattgagaaagcgccacgcttcccgaagggagaaaggcggacaggtatccggtaagcggcagggtcggaacaggagagcgcacgagggagcttccagggggaaacgcctggtatctttatagtcctgtcgggtttcgccacctctgacttgagcgtcgatttttgtgatgctcgtcaggggggcggagcctatggaaaaacgccagcaacgcggcctttttacggttcctggccttttgctggccttttgct

SEQ ID NO: 212 - DNA, 3888 bp, Artificial Sequence
  ARI-136
ctttcctgcgttatcccctgattctgtggataaccgtattaccgcctttgagtgagctgataccgctcgccgcagccgaacgaccgagcgcagcgagtcagtgagcgaggaagcggaagagcgcccaatacgcaaaccgcctctccccgcgcgttggccgattcattaatgcagctggcacgacaggtttcccgactggaaagcgggcagtgagcgcaacgcaattaatacgcgtaccgctagccaggaagagtttgtagaaacgcaaaaaggccatccgtcaggatggccttctgcttagtttgatgcctggcagtttatggcgggcgtcctgcccgccaccctccgggccgttgcttcacaacgttcaaatccgctcccggcggatttgtcctactcaggagagcgttcaccgacaaacaacagataaaacgaaaggcccagtcttccgactgagcctttcgttttatttgatgcctggcagttccctactctcgcgttaacgctagcatggatgttttcccagtcacgacgttgtaaaacgacggccagtcttaagctcgggccccaaataatgattttattttgactgatagtgacctgttcgttgcaacaaattgatgagcaatgcttttttataatgccaactttgtacaaaaaagcaggctttaaaggaaccaattcagtcgagaattggtaccatatttgcatgtcgctatgtgttctgggaaatcaccataaacgtgaaatgtctttggatttgggaatcttataagttctgtatgagaccactccctaggcagctggaattctttctatctagagtagaaagaattccagctgcttttttcgacagatctggcgcgccatagtggccagcggccgcaggtaagccagcccaggcctcgccctccagctcaaggcgggacaggtgccctagagtagcctgcatccagggacaggccccagccgggtgctgacacgtccacctccatctcttcctcaggtctgcccgggtggcatccctgtgacccctccccagtgcctctcctggccctggaagttgccactccagtgcccaccagccttgtcctaataaaattaagttgcatcattttgtctgactaggtgtccttctataatattatggggtggaggggggtggtatggagcaaggggcccaagttaacttgtttattgcagcttataatggttacaaataaagcaatagcatcacaaatttcacaaataaagcatttttttcactgcattctagttgtggtttgtccaaactcatcaatgtatcttatcatgtctggatccaaggtcgggcaggaagagggcctatttcccatgattccttcatatttgcatatacgatacaaggctgttagagagataattagaattaatttgactgtaaacacaaagatattagtacaaaatacgtgacgtagaaagtaataatttcttgggtagtttgcagttttaaaattatgttttaaaatggactatcatatgcttaccgtaacttgaaagtatttcgatttcttggctttatatatcttgtggaaaggacgaaactaggccgactacaagcgaattatctagagtaattcgcttgtagtcggcttttttcgagtagctagagaattcatggtaatagcgatgactaatacgtagatgtactgccaagtaggaaagtcccataaggtcatgtactgggcataatgccaggcgggccatttaccgtcattgacgtcaatagggggcgtacttggcatatgatacacttgatgtactgccaagtgggcagtttaccgtaaatagtccacccattgacgtcaatggaaagtccctattggcgttactatgggaacatacgtcattattgacgtcaatgggcgggggtcgttgggcggtcagccaggcgggccatttaccgtaagttatgtaacgcggaactccatatatgggctatgaactaatgaccccgtaattgattactattaataactagacccagctttcttgtacaaagttggcattataagaaagcattgcttatcaatttgttgcaacgaacaggtcactatcagtcaaaataaaatcattatttgccatccagctgatatcccctatagtgagtcgtattacatggtcatagctgtttcctggcagctctggcccgtgtctcaaaatctctgatgttacattgcacaagataaaaatatatcatcatgaacaataaaactgtctgcttacataaacagtaatacaaggggtgttatgagccatattcaacgggaaacgtcgaggccgcgattaaattccaacatggatgctgatttatatgggtataaatgggctcgcgataatgtcgggcaatcaggtgcgacaatctatcgcttgtatgggaagcccgatgcgccagagttgtttctgaaacatggcaaaggtagcgttgccaatgatgttacagatgagatggtcagactaaactggctgacggaatttatgcctcttccgaccatcaagcattttatccgtactcctgatgatgcatggttactcaccactgcgatccccggaaaaacagcattccaggtattagaagaatatcctgattcaggtgaaaatattgttgatgcgctggcagtgttcctgcgccggttgcattcgattcctgtttgtaattgtccttttaacagcgatcgcgtatttcgtctcgctcaggcgcaatcacgaatgaataacggtttggttgatgcgagtgattttgatgacgagcgtaatggctggcctgttgaacaagtctggaaagaaatgcataaacttttgccattctcaccggattcagtcgtcactcatggtgatttctcacttgataaccttatttttgacgaggggaaattaataggttgtattgatgttggacgagtcggaatcgcagaccgataccaggatcttgccatcctatggaactgcctcggtgagttttctccttcattacagaaacggctttttcaaaaatatggtattgataatcctgatatgaataaattgcagtttcatttgatgctcgatgagtttttctaatcagaattggttaattggttgtaacactggcagagcattacgctgacttgacgggacggcgcaagctcatgaccaaaatcccttaacgtgagttacgcgtcgttccactgagcgtcagaccccgtagaaaagatcaaaggatcttcttgagatcctttttttctgcgcgtaatctgctgcttgcaaacaaaaaaaccaccgctaccagcggtggtttgtttgccggatcaagagctaccaactctttttccgaaggtaactggcttcagcagagcgcagataccaaatactgtccttctagtgtagccgtagttaggccaccacttcaagaactctgtagcaccgcctacatacctcgctctgctaatcctgttaccagtggctgctgccagtggcgataagtcgtgtcttaccgggttggactcaagacgatagttaccggataaggcgcagcggtcgggctgaacggggggttcgtgcacacagcccagcttggagcgaacgacctacaccgaactgagatacctacagcgtgagcattgagaaagcgccacgcttcccgaagggagaaaggcggacaggtatccggtaagcggcagggtcggaacaggagagcgcacgagggagcttccagggggaaacgcctggtatctttatagtcctgtcgggtttcgccacctctgacttgagcgtcgatttttgtgatgctcgtcaggggggcggagcctatggaaaaacgccagcaacgcggcctttttacggttcctggccttttgctggccttttgct

SEQ ID NO: 213 - DNA, 3890 bp, Artificial Sequence
  ARI-137
ctttcctgcgttatcccctgattctgtggataaccgtattaccgcctttgagtgagctgataccgctcgccgcagccgaacgaccgagcgcagcgagtcagtgagcgaggaagcggaagagcgcccaatacgcaaaccgcctctccccgcgcgttggccgattcattaatgcagctggcacgacaggtttcccgactggaaagcgggcagtgagcgcaacgcaattaatacgcgtaccgctagccaggaagagtttgtagaaacgcaaaaaggccatccgtcaggatggccttctgcttagtttgatgcctggcagtttatggcgggcgtcctgcccgccaccctccgggccgttgcttcacaacgttcaaatccgctcccggcggatttgtcctactcaggagagcgttcaccgacaaacaacagataaaacgaaaggcccagtcttccgactgagcctttcgttttatttgatgcctggcagttccctactctcgcgttaacgctagcatggatgttttcccagtcacgacgttgtaaaacgacggccagtcttaagctcgggccccaaataatgattttattttgactgatagtgacctgttcgttgcaacaaattgatgagcaatgcttttttataatgccaactttgtacaaaaaagcaggctttaaaggaaccaattcagtcgagaattggtaccatatttgcatgtcgctatgtgttctgggaaatcaccataaacgtgaaatgtctttggatttgggaatcttataagttctgtatgagaccactccctaggatgtgaccttctacaagattctagagatcttgtagaaggtcacatcttttttcgacagatctggcgcgccatagtggccagcggccgcaggtaagccagcccaggcctcgccctccagctcaaggcgggacaggtgccctagagtagcctgcatccagggacaggccccagccgggtgctgacacgtccacctccatctcttcctcaggtctgcccgggtggcatccctgtgacccctccccagtgcctctcctggccctggaagttgccactccagtgcccaccagccttgtcctaataaaattaagttgcatcattttgtctgactaggtgtccttctataatattatggggtggaggggggtggtatggagcaaggggcccaagttaacttgtttattgcagcttataatggttacaaataaagcaatagcatcacaaatttcacaaataaagcatttttttcactgcattctagttgtggtttgtccaaactcatcaatgtatcttatcatgtctggatccaaggtcgggcaggaagagggcctatttcccatgattccttcatatttgcatatacgatacaaggctgttagagagataattagaattaatttgactgtaaacacaaagatattagtacaaaatacgtgacgtagaaagtaataatttcttgggtagtttgcagttttaaaattatgttttaaaatggactatcatatgcttaccgtaacttgaaagtatttcgatttcttggctttatatatcttgtggaaaggacgaaactaggccgactacaagcgaattatctagagtaattcgcttgtagtcggcttttttcgagtagctagagaattcatggtaatagcgatgactaatacgtagatgtactgccaagtaggaaagtcccataaggtcatgtactgggcataatgccaggcgggccatttaccgtcattgacgtcaatagggggcgtacttggcatatgatacacttgatgtactgccaagtgggcagtttaccgtaaatagtccacccattgacgtcaatggaaagtccctattggcgttactatgggaacatacgtcattattgacgtcaatgggcgggggtcgttgggcggtcagccaggcgggccatttaccgtaagttatgtaacgcggaactccatatatgggctatgaactaatgaccccgtaattgattactattaataactagacccagctttcttgtacaaagttggcattataagaaagcattgcttatcaatttgttgcaacgaacaggtcactatcagtcaaaataaaatcattatttgccatccagctgatatcccctatagtgagtcgtattacatggtcatagctgtttcctggcagctctggcccgtgtctcaaaatctctgatgttacattgcacaagataaaaatatatcatcatgaacaataaaactgtctgcttacataaacagtaatacaaggggtgttatgagccatattcaacgggaaacgtcgaggccgcgattaaattccaacatggatgctgatttatatgggtataaatgggctcgcgataatgtcgggcaatcaggtgcgacaatctatcgcttgtatgggaagcccgatgcgccagagttgtttctgaaacatggcaaaggtagcgttgccaatgatgttacagatgagatggtcagactaaactggctgacggaatttatgcctcttccgaccatcaagcattttatccgtactcctgatgatgcatggttactcaccactgcgatccccggaaaaacagcattccaggtattagaagaatatcctgattcaggtgaaaatattgttgatgcgctggcagtgttcctgcgccggttgcattcgattcctgtttgtaattgtccttttaacagcgatcgcgtatttcgtctcgctcaggcgcaatcacgaatgaataacggtttggttgatgcgagtgattttgatgacgagcgtaatggctggcctgttgaacaagtctggaaagaaatgcataaacttttgccattctcaccggattcagtcgtcactcatggtgatttctcacttgataaccttatttttgacgaggggaaattaataggttgtattgatgttggacgagtcggaatcgcagaccgataccaggatcttgccatcctatggaactgcctcggtgagttttctccttcattacagaaacggctttttcaaaaatatggtattgataatcctgatatgaataaattgcagtttcatttgatgctcgatgagtttttctaatcagaattggttaattggttgtaacactggcagagcattacgctgacttgacgggacggcgcaagctcatgaccaaaatcccttaacgtgagttacgcgtcgttccactgagcgtcagaccccgtagaaaagatcaaaggatcttcttgagatcctttttttctgcgcgtaatctgctgcttgcaaacaaaaaaaccaccgctaccagcggtggtttgtttgccggatcaagagctaccaactctttttccgaaggtaactggcttcagcagagcgcagataccaaatactgtccttctagtgtagccgtagttaggccaccacttcaagaactctgtagcaccgcctacatacctcgctctgctaatcctgttaccagtggctgctgccagtggcgataagtcgtgtcttaccgggttggactcaagacgatagttaccggataaggcgcagcggtcgggctgaacggggggttcgtgcacacagcccagcttggagcgaacgacctacaccgaactgagatacctacagcgtgagcattgagaaagcgccacgcttcccgaagggagaaaggcggacaggtatccggtaagcggcagggtcggaacaggagagcgcacgagggagcttccagggggaaacgcctggtatctttatagtcctgtcgggtttcgccacctctgacttgagcgtcgatttttgtgatgctcgtcaggggggcggagcctatggaaaaacgccagcaacgcggcctttttacggttcctggccttttgctggccttttgct

SEQ ID NO: 214 - DNA, 3379 bp, Artificial Sequence
  misc_feature (1018)...(1038): n may be any nucleotide
  misc_feature (1060)...(1080): n may be any nucleotide
  source (1)...(3379): ARI-205
ctttcctgcgttatcccctgattctgtggataaccgtattaccgcctttgagtgagctgataccgctcgccgcagccgaacgaccgagcgcagcgagtcagtgagcgaggaagcggaagagcgcccaatacgcaaaccgcctctccccgcgcgttggccgattcattaatgcagctggcacgacaggtttcccgactggaaagcgggcagtgagcgcaacgcaattaatacgcgtaccgctagccaggaagagtttgtagaaacgcaaaaaggccatccgtcaggatggccttctgcttagtttgatgcctggcagtttatggcgggcgtcctgcccgccaccctccgggccgttgcttcacaacgttcaaatccgctcccggcggatttgtcctactcaggagagcgttcaccgacaaacaacagataaaacgaaaggcccagtcttccgactgagcctttcgttttatttgatgcctggcagttccctactctcgcgttaacgctagcatggatgttttcccagtcacgacgttgtaaaacgacggccagtcttaagctcgggccccaaataatgattttattttgactgatagtgacctgttcgttgcaacaaattgatgagcaatgcttttttataatgccaactttgtacaaaaaagcaggctttaaaggaaccaattcagtcgactggatccaaggtcgggcaggaagagggcctatttcccatgattccttcatatttgcatatacgatacaaggctgttagagagataattagaattaatttgactgtaaacacaaagatattagtacaaaatacgtgacgtagaaagtaataatttcttgggtagtttgcagttttaaaattatgttttaaaatggactatcatatgcttaccgtaacttgaaagtatttcgatttcttggctttatatatcttgtggaaaggacgaaactagtccggatcaacgccctaggtttatgtttggatgaactgacatacgcgtatccgtcnnnnnnnnnnnnnnnnnnnnngtagtgaaatatatattaaacnnnnnnnnnnnnnnnnnnnnntacggtaacgcggaattcgcaactattttatcaattttttgcgtcgactcgagtagctagagaattcatggtaatagcgatgactaatacgtagatgtactgccaagtaggaaagtcccataaggtcatgtactgggcataatgccaggcgggccatttaccgtcattgacgtcaatagggggcgtacttggcatatgatacacttgatgtactgccaagtgggcagtttaccgtaaatagtccacccattgacgtcaatggaaagtccctattggcgttactatgggaacatacgtcattattgacgtcaatgggcgggggtcgttgggcggtcagccaggcgggccatttaccgtaagttatgtaacgcggaactccatatatgggctatgaactaatgaccccgtaattgattactattaataactagacccagctttcttgtacaaagttggcattataagaaagcattgcttatcaatttgttgcaacgaacaggtcactatcagtcaaaataaaatcattatttgccatccagctgatatcccctatagtgagtcgtattacatggtcatagctgtttcctggcagctctggcccgtgtctcaaaatctctgatgttacattgcacaagataaaaatatatcatcatgaacaataaaactgtctgcttacataaacagtaatacaaggggtgttatgagccatattcaacgggaaacgtcgaggccgcgattaaattccaacatggatgctgatttatatgggtataaatgggctcgcgataatgtcgggcaatcaggtgcgacaatctatcgcttgtatgggaagcccgatgcgccagagttgtttctgaaacatggcaaaggtagcgttgccaatgatgttacagatgagatggtcagactaaactggctgacggaatttatgcctcttccgaccatcaagcattttatccgtactcctgatgatgcatggttactcaccactgcgatccccggaaaaacagcattccaggtattagaagaatatcctgattcaggtgaaaatattgttgatgcgctggcagtgttcctgcgccggttgcattcgattcctgtttgtaattgtccttttaacagcgatcgcgtatttcgtctcgctcaggcgcaatcacgaatgaataacggtttggttgatgcgagtgattttgatgacgagcgtaatggctggcctgttgaacaagtctggaaagaaatgcataaacttttgccattctcaccggattcagtcgtcactcatggtgatttctcacttgataaccttatttttgacgaggggaaattaataggttgtattgatgttggacgagtcggaatcgcagaccgataccaggatcttgccatcctatggaactgcctcggtgagttttctccttcattacagaaacggctttttcaaaaatatggtattgataatcctgatatgaataaattgcagtttcatttgatgctcgatgagtttttctaatcagaattggttaattggttgtaacactggcagagcattacgctgacttgacgggacggcgcaagctcatgaccaaaatcccttaacgtgagttacgcgtcgttccactgagcgtcagaccccgtagaaaagatcaaaggatcttcttgagatcctttttttctgcgcgtaatctgctgcttgcaaacaaaaaaaccaccgctaccagcggtggtttgtttgccggatcaagagctaccaactctttttccgaaggtaactggcttcagcagagcgcagataccaaatactgtccttctagtgtagccgtagttaggccaccacttcaagaactctgtagcaccgcctacatacctcgctctgctaatcctgttaccagtggctgctgccagtggcgataagtcgtgtcttaccgggttggactcaagacgatagttaccggataaggcgcagcggtcgggctgaacggggggttcgtgcacacagcccagcttggagcgaacgacctacaccgaactgagatacctacagcgtgagcattgagaaagcgccacgcttcccgaagggagaaaggcggacaggtatccggtaagcggcagggtcggaacaggagagcgcacgagggagcttccagggggaaacgcctggtatctttatagtcctgtcgggtttcgccacctctgacttgagcgtcgatttttgtgatgctcgtcaggggggcggagcctatggaaaaacgccagcaacgcggcctttttacggttcctggccttttgctggccttttgct

SEQ ID NO: 215 - DNA, 4744 bp, Artificial Sequence
  misc_feature (3377)...(3398): n may be any nucleotide
  misc_feature (3418)...(3439): n may be any nucleotide
  source (1)...(4744): ARI-206
aacatgtgagcaaaaggccagcaaaaggccaggaaccgtaaaaaggccgcgttgctggcgtttttccataggctccgcccccctgacgagcatcacaaaaatcgacgctcaagtcagaggtggcgaaacccgacaggactataaagataccaggcgtttccccctggaagctccctcgtgcgctctcctgttccgaccctgccgcttaccggatacctgtccgcctttctcccttcgggaagcgtggcgctttctcaatgctcacgctgtaggtatctcagttcggtgtaggtcgttcgctccaagctgggctgtgtgcacgaaccccccgttcagcccgaccgctgcgccttatccggtaactatcgtcttgagtccaacccggtaagacacgacttatcgccactggcagcagccactggtaacaggattagcagagcgaggtatgtaggcggtgctacagagttcttgaagtggtggcctaactacggctacactagaaggacagtatttggtatctgcgctctgctgaagccagttaccttcggaaaaagagttggtagctcttgatccggcaaacaaaccaccgctggtagcggtggtttttttgtttgcaagcagcagattacgcgcagaaaaaaaggatctcaagaagatcctttgatcttttctacggggtctgacgctcagtggaacgacgcgtaactcacgttaagggattttggtcatgagcttgcgccgtcccgtcaagtcagcgtaatgctctgccagtgttacaaccaattaaccaattctgattagaaaaactcatcgagcatcaaatgaaactgcaatttattcatatcaggattatcaataccatatttttgaaaaagccgtttctgtaatgaaggagaaaactcaccgaggcagttccataggatggcaagatcctggtatcggtctgcgattccgactcgtccaacatcaatacaacctattaatttcccctcgtcaaaaataaggttatcaagtgagaaatcaccatgagtgacgactgaatccggtgagaatggcaaaagtttatgcatttctttccagacttgttcaacaggccagccattacgctcgtcatcaaaatcactcgcatcaaccaaaccgttattcattcgtgattgcgcctgagcgagacgaaatacgcgatcgctgttaaaaggacaattacaaacaggaatcgaatgcaaccggcgcaggaacactgccagcgcatcaacaatattttcacctgaatcaggatattcttctaatacctggaatgctgtttttccggggatcgcagtggtgagtaaccatgcatcatcaggagtacggataaaatgcttgatggtcggaagaggcataaattccgtcagccagtttagtctgaccatctcatctgtaacatcattggcaacgctacctttgccatgtttcagaaacaactctggcgcatcgggcttcccatacaagcgatagattgtcgcacctgattgcccgacattatcgcgagcccatttatacccatataaatcagcatccatgttggaatttaatcgcggcctcgacgtttcccgttgaatatggctcataacaccccttgtattactgtttatgtaagcagacagttttattgttcatgatgatatatttttatcttgtgcaatgtaacatcagagattttgagacacgggccagagctgccaggaaacagctatgaccatgtaatacgactcactataggggatatcagctggatggcaaataatgattttattttgactgatagtgacctgttcgttgcaacaaattgataagcaatgctttcttataatgccaactttgtacaagaaagctgggtctagttattaatagtaatcaattacggggtcattagttcatagcccatatatggagttccgcgttacataacttacggtaaatggcccgcctggctgaccgcccaacgacccccgcccattgacgtcaataatgacgtatgttcccatagtaacgccaatagggactttccattgacgtcaatgggtggactatttacggtaaactgcccacttggcagtacatcaagtgtatcatatgccaagtacgccccctattgacgtcaatgacggtaaatggcccgcctggcattatgcccagtacatgaccttatgggactttcctacttggcagtacatctacgtattagtcatcgctattaccatggtgatgcggttttggcagtacatcaatgggcgtggatagcggtttgactcacggggatttccaagtctccaccccattgacgtcaatgggagtttgttttggcaccaaaatcaacgggactttccaaaatgtcgtaacaactccgccccattgacgcaaatgggcggtaggcgtgtacggtgggaggtctatataagcagagctctctggctaactagagaacccactgcttactggcttatcgaaattaatacgactcactatagggagacccaagcttagatctgtttccggtcgccaccatgagcgagctgatcaaggagaacatgcacatgaagctgtacatggagggcaccgtgaacaaccaccacttcaagtgcacatccgagggcgaaggcaagccctacgagggcacccagaccatgaagatcaaggtggtcgagggcggccctctccccttcgccttcgacatcctggctaccagcttcatgtacggcagcaaagccttcatcaaccacacccagggcatccccgacttctttaagcagtccttccctgagggcttcacatgggagagaatcaccacatacgaagacgggggcgtgctgaccgctacccaggacaccagcttccagaacggctgcatcatctacaacgtcaagatcaacggggtgaacttcccatccaacggccctgtgatgcagaagaaaacacgcggctgggaggccaacaccgagatgctgtaccccgctgacggcggcctgagaggccacagccagatggccctgaagctcgtgggcgggggctacctgcactgctccttcaagaccacatacagatccaagaaacccgctaagaacctcaagatgcccggcttccacttcgtggaccacagactggaaagaatcaaggaggccgacaaagagacctacgtcgagcagcacgagatggctgtggccaagtactgcgacctccctagcaaactggggcacagataatcgatagtttgtttgaatgaggcttcagtactttacagaatcgttgcctgcacatcttggaaacacttgctgggattacttcttcaggttaacccaacagaaggctcgagaaggtatattgctgttgacagtgagcgnnnnnnnnnnnnnnnnnnnnnntagtgaagccacagatgtannnnnnnnnnnnnnnnnnnnnntgcctactgcctcggaattcaaggggctactttaggagcaattatcttgtttactaaaactgaataccttgctatctctttgatacatttttacaaagctgaattaaaatggtataaattaaatcacttttttcaattctctagaggtaccgcatgcgtacgtggccagcggccgcaggtaagccagcccaggcctcgccctccagctcaaggcgggacaggtgccctagagtagcctgcatccagggacaggccccagccgggtgctgacacgtccacctccatctcttcctcaggtctgcccgggtggcatccctgtgacccctccccagtgcctctcctggccctggaagttgccactccagtgcccaccagccttgtcctaataaaattaagttgcatcattttgtctgactaggtgtccttctataatattatggggtggaggggggtggtatggagcaaggggcccaagttaacttgtttattgcagcttataatggttacaaataaagcaatagcatcacaaatttcacaaataaagcatttttttcactgcattctagttgtggtttgtccaaactcatcaatgtatcttatcatgtctggatccagtcgactgaattggttcctttaaagcctgcttttttgtacaaagttggcattataaaaaagcattgctcatcaatttgttgcaacgaacaggtcactatcagtcaaaataaaatcattatttggggcccgagcttaagactggccgtcgttttacaacgtcgtgactgggaaaacatccatgctagcgttaacgcgagagtagggaactgccaggcatcaaataaaacgaaaggctcagtcggaagactgggcctttcgttttatctgttgtttgtcggtgaacgctctcctgagtaggacaaatccgccgggagcggatttgaacgttgtgaagcaacggcccggagggtggcgggcaggacgcccgccataaactgccaggcatcaaactaagcagaaggccatcctgacggatggcctttttgcgtttctacaaactcttcctggctagcggtacgcgtattaattgcgttgcgctcactgcccgctttccagtcgggaaacctgtcgtgccagctgcattaatgaatcggccaacgcgcggggagaggcggtttgcgtattgggcgctcttccgcttcctcgctcactgactcgctgcgctcggtcgttcggctgcggcgagcggtatcagctcactcaaaggcggtaatacggttatccacagaatcaggggataacgcaggaaag

SEQ ID NO: 216 - DNA, 3377 bp, Artificial Sequence
  misc_feature (1018)...(1036): n may be any nucleotide
  misc_feature (1058)...(1078): n may be any nucleotide
  source (1)...(3377): ARI-207
ctttcctgcgttatcccctgattctgtggataaccgtattaccgcctttgagtgagctgataccgctcgccgcagccgaacgaccgagcgcagcgagtcagtgagcgaggaagcggaagagcgcccaatacgcaaaccgcctctccccgcgcgttggccgattcattaatgcagctggcacgacaggtttcccgactggaaagcgggcagtgagcgcaacgcaattaatacgcgtaccgctagccaggaagagtttgtagaaacgcaaaaaggccatccgtcaggatggccttctgcttagtttgatgcctggcagtttatggcgggcgtcctgcccgccaccctccgggccgttgcttcacaacgttcaaatccgctcccggcggatttgtcctactcaggagagcgttcaccgacaaacaacagataaaacgaaaggcccagtcttccgactgagcctttcgttttatttgatgcctggcagttccctactctcgcgttaacgctagcatggatgttttcccagtcacgacgttgtaaaacgacggccagtcttaagctcgggccccaaataatgattttattttgactgatagtgacctgttcgttgcaacaaattgatgagcaatgcttttttataatgccaactttgtacaaaaaagcaggctttaaaggaaccaattcagtcgactggatccaaggtcgggcaggaagagggcctatttcccatgattccttcatatttgcatatacgatacaaggctgttagagagataattagaattaatttgactgtaaacacaaagatattagtacaaaatacgtgacgtagaaagtaataatttcttgggtagtttgcagttttaaaattatgttttaaaatggactatcatatgcttaccgtaacttgaaagtatttcgatttcttggctttatatatcttgtggaaaggacgaaactagtccggatcaacgccctaggtttatgtttggatgaactgacatacgcgtatccgtcnnnnnnnnnnnnnnnnnnngtagtgaaatatatattaaacnnnnnnnnnnnnnnnnnnnnntacggtaacgcggaattcgcaactattttatcaattttttgcgtcgactcgagtagctagagaattcatggtaatagcgatgactaatacgtagatgtactgccaagtaggaaagtcccataaggtcatgtactgggcataatgccaggcgggccatttaccgtcattgacgtcaatagggggcgtacttggcatatgatacacttgatgtactgccaagtgggcagtttaccgtaaatagtccacccattgacgtcaatggaaagtccctattggcgttactatgggaacatacgtcattattgacgtcaatgggcgggggtcgttgggcggtcagccaggcgggccatttaccgtaagttatgtaacgcggaactccatatatgggctatgaactaatgaccccgtaattgattactattaataactagacccagctttcttgtacaaagttggcattataagaaagcattgcttatcaatttgttgcaacgaacaggtcactatcagtcaaaataaaatcattatttgccatccagctgatatcccctatagtgagtcgtattacatggtcatagctgtttcctggcagctctggcccgtgtctcaaaatctctgatgttacattgcacaagataaaaatatatcatcatgaacaataaaactgtctgcttacataaacagtaatacaaggggtgttatgagccatattcaacgggaaacgtcgaggccgcgattaaattccaacatggatgctgatttatatgggtataaatgggctcgcgataatgtcgggcaatcaggtgcgacaatctatcgcttgtatgggaagcccgatgcgccagagttgtttctgaaacatggcaaaggtagcgttgccaatgatgttacagatgagatggtcagactaaactggctgacggaatttatgcctcttccgaccatcaagcattttatccgtactcctgatgatgcatggttactcaccactgcgatccccggaaaaacagcattccaggtattagaagaatatcctgattcaggtgaaaatattgttgatgcgctggcagtgttcctgcgccggttgcattcgattcctgtttgtaattgtccttttaacagcgatcgcgtatttcgtctcgctcaggcgcaatcacgaatgaataacggtttggttgatgcgagtgattttgatgacgagcgtaatggctggcctgttgaacaagtctggaaagaaatgcataaacttttgccattctcaccggattcagtcgtcactcatggtgatttctcacttgataaccttatttttgacgaggggaaattaataggttgtattgatgttggacgagtcggaatcgcagaccgataccaggatcttgccatcctatggaactgcctcggtgagttttctccttcattacagaaacggctttttcaaaaatatggtattgataatcctgatatgaataaattgcagtttcatttgatgctcgatgagtttttctaatcagaattggttaattggttgtaacactggcagagcattacgctgacttgacgggacggcgcaagctcatgaccaaaatcccttaacgtgagttacgcgtcgttccactgagcgtcagaccccgtagaaaagatcaaaggatcttcttgagatcctttttttctgcgcgtaatctgctgcttgcaaacaaaaaaaccaccgctaccagcggtggtttgtttgccggatcaagagctaccaactctttttccgaaggtaactggcttcagcagagcgcagataccaaatactgtccttctagtgtagccgtagttaggccaccacttcaagaactctgtagcaccgcctacatacctcgctctgctaatcctgttaccagtggctgctgccagtggcgataagtcgtgtcttaccgggttggactcaagacgatagttaccggataaggcgcagcggtcgggctgaacggggggttcgtgcacacagcccagcttggagcgaacgacctacaccgaactgagatacctacagcgtgagcattgagaaagcgccacgcttcccgaagggagaaaggcggacaggtatccggtaagcggcagggtcggaacaggagagcgcacgagggagcttccagggggaaacgcctggtatctttatagtcctgtcgggtttcgccacctctgacttgagcgtcgatttttgtgatgctcgtcaggggggcggagcctatggaaaaacgccagcaacgcggcctttttacggttcctggccttttgctggccttttgct

SEQ ID NO: 217 - DNA, 4738 bp, Artificial Sequence
  misc_feature (3377)...(3395): n may be any nucleotide
  misc_feature (3415)...(3433): n may be any nucleotide
  source (1)...(4738): ARI-208
aacatgtgagcaaaaggccagcaaaaggccaggaaccgtaaaaaggccgcgttgctggcgtttttccataggctccgcccccctgacgagcatcacaaaaatcgacgctcaagtcagaggtggcgaaacccgacaggactataaagataccaggcgtttccccctggaagctccctcgtgcgctctcctgttccgaccctgccgcttaccggatacctgtccgcctttctcccttcgggaagcgtggcgctttctcaatgctcacgctgtaggtatctcagttcggtgtaggtcgttcgctccaagctgggctgtgtgcacgaaccccccgttcagcccgaccgctgcgccttatccggtaactatcgtcttgagtccaacccggtaagacacgacttatcgccactggcagcagccactggtaacaggattagcagagcgaggtatgtaggcggtgctacagagttcttgaagtggtggcctaactacggctacactagaaggacagtatttggtatctgcgctctgctgaagccagttaccttcggaaaaagagttggtagctcttgatccggcaaacaaaccaccgctggtagcggtggtttttttgtttgcaagcagcagattacgcgcagaaaaaaaggatctcaagaagatcctttgatcttttctacggggtctgacgctcagtggaacgacgcgtaactcacgttaagggattttggtcatgagcttgcgccgtcccgtcaagtcagcgtaatgctctgccagtgttacaaccaattaaccaattctgattagaaaaactcatcgagcatcaaatgaaactgcaatttattcatatcaggattatcaataccatatttttgaaaaagccgtttctgtaatgaaggagaaaactcaccgaggcagttccataggatggcaagatcctggtatcggtctgcgattccgactcgtccaacatcaatacaacctattaatttcccctcgtcaaaaataaggttatcaagtgagaaatcaccatgagtgacgactgaatccggtgagaatggcaaaagtttatgcatttctttccagacttgttcaacaggccagccattacgctcgtcatcaaaatcactcgcatcaaccaaaccgttattcattcgtgattgcgcctgagcgagacgaaatacgcgatcgctgttaaaaggacaattacaaacaggaatcgaatgcaaccggcgcaggaacactgccagcgcatcaacaatattttcacctgaatcaggatattcttctaatacctggaatgctgtttttccggggatcgcagtggtgagtaaccatgcatcatcaggagtacggataaaatgcttgatggtcggaagaggcataaattccgtcagccagtttagtctgaccatctcatctgtaacatcattggcaacgctacctttgccatgtttcagaaacaactctggcgcatcgggcttcccatacaagcgatagattgtcgcacctgattgcccgacattatcgcgagcccatttatacccatataaatcagcatccatgttggaatttaatcgcggcctcgacgtttcccgttgaatatggctcataacaccccttgtattactgtttatgtaagcagacagttttattgttcatgatgatatatttttatcttgtgcaatgtaacatcagagattttgagacacgggccagagctgccaggaaacagctatgaccatgtaatacgactcactataggggatatcagctggatggcaaataatgattttattttgactgatagtgacctgttcgttgcaacaaattgataagcaatgctttcttataatgccaactttgtacaagaaagctgggtctagttattaatagtaatcaattacggggtcattagttcatagcccatatatggagttccgcgttacataacttacggtaaatggcccgcctggctgaccgcccaacgacccccgcccattgacgtcaataatgacgtatgttcccatagtaacgccaatagggactttccattgacgtcaatgggtggactatttacggtaaactgcccacttggcagtacatcaagtgtatcatatgccaagtacgccccctattgacgtcaatgacggtaaatggcccgcctggcattatgcccagtacatgaccttatgggactttcctacttggcagtacatctacgtattagtcatcgctattaccatggtgatgcggttttggcagtacatcaatgggcgtggatagcggtttgactcacggggatttccaagtctccaccccattgacgtcaatgggagtttgttttggcaccaaaatcaacgggactttccaaaatgtcgtaacaactccgccccattgacgcaaatgggcggtaggcgtgtacggtgggaggtctatataagcagagctctctggctaactagagaacccactgcttactggcttatcgaaattaatacgactcactatagggagacccaagcttagatctgtttccggtcgccaccatgagcgagctgatcaaggagaacatgcacatgaagctgtacatggagggcaccgtgaacaaccaccacttcaagtgcacatccgagggcgaaggcaagccctacgagggcacccagaccatgaagatcaaggtggtcgagggcggccctctccccttcgccttcgacatcctggctaccagcttcatgtacggcagcaaagccttcatcaaccacacccagggcatccccgacttctttaagcagtccttccctgagggcttcacatgggagagaatcaccacatacgaagacgggggcgtgctgaccgctacccaggacaccagcttccagaacggctgcatcatctacaacgtcaagatcaacggggtgaacttcccatccaacggccctgtgatgcagaagaaaacacgcggctgggaggccaacaccgagatgctgtaccccgctgacggcggcctgagaggccacagccagatggccctgaagctcgtgggcgggggctacctgcactgctccttcaagaccacatacagatccaagaaacccgctaagaacctcaagatgcccggcttccacttcgtggaccacagactggaaagaatcaaggaggccgacaaagagacctacgtcgagcagcacgagatggctgtggccaagtactgcgacctccctagcaaactggggcacagataatcgatagtttgtttgaatgaggcttcagtactttacagaatcgttgcctgcacatcttggaaacacttgctgggattacttcttcaggttaacccaacagaaggctcgagaaggtatattgctgttgacagtgagcgnnnnnnnnnnnnnnnnnnntagtgaagccacagatgtannnnnnnnnnnnnnnnnnntgcctactgcctcggaattcaaggggctactttaggagcaattatcttgtttactaaaactgaataccttgctatctctttgatacatttttacaaagctgaattaaaatggtataaattaaatcacttttttcaattctctagaggtaccgcatgcgtacgtggccagcggccgcaggtaagccagcccaggcctcgccctccagctcaaggcgggacaggtgccctagagtagcctgcatccagggacaggccccagccgggtgctgacacgtccacctccatctcttcctcaggtctgcccgggtggcatccctgtgacccctccccagtgcctctcctggccctggaagttgccactccagtgcccaccagccttgtcctaataaaattaagttgcatcattttgtctgactaggtgtccttctataatattatggggtggaggggggtggtatggagcaaggggcccaagttaacttgtttattgcagcttataatggttacaaataaagcaatagcatcacaaatttcacaaataaagcatttttttcactgcattctagttgtggtttgtccaaactcatcaatgtatcttatcatgtctggatccagtcgactgaattggttcctttaaagcctgcttttttgtacaaagttggcattataaaaaagcattgctcatcaatttgttgcaacgaacaggtcactatcagtcaaaataaaatcattatttggggcccgagcttaagactggccgtcgttttacaacgtcgtgactgggaaaacatccatgctagcgttaacgcgagagtagggaactgccaggcatcaaataaaacgaaaggctcagtcggaagactgggcctttcgttttatctgttgtttgtcggtgaacgctctcctgagtaggacaaatccgccgggagcggatttgaacgttgtgaagcaacggcccggagggtggcgggcaggacgcccgccataaactgccaggcatcaaactaagcagaaggccatcctgacggatggcctttttgcgtttctacaaactcttcctggctagcggtacgcgtattaattgcgttgcgctcactgcccgctttccagtcgggaaacctgtcgtgccagctgcattaatgaatcggccaacgcgcggggagaggcggtttgcgtattgggcgctcttccgcttcctcgctcactgactcgctgcgctcggtcgttcggctgcggcgagcggtatcagctcactcaaaggcggtaatacggttatccacagaatcaggggataacgcaggaaag

SEQ ID NO: 218 - DNA, 6329 bp, Artificial Sequence
  pKD46
catcgatttattatgacaacttgacggctacatcattcactttttcttcacaaccggcacggaactcgctcgggctggccccggtgcattttttaaatacccgcgagaaatagagttgatcgtcaaaaccaacattgcgaccgacggtggcgataggcatccgggtggtgctcaaaagcagcttcgcctggctgatacgttggtcctcgcgccagcttaagacgctaatccctaactgctggcggaaaagatgtgacagacgcgacggcgacaagcaaacatgctgtgcgacgctggcgatatcaaaattgctgtctgccaggtgatcgctgatgtactgacaagcctcgcgtacccgattatccatcggtggatggagcgactcgttaatcgcttccatgcgccgcagtaacaattgctcaagcagatttatcgccagcagctccgaatagcgcccttccccttgcccggcgttaatgatttgcccaaacaggtcgctgaaatgcggctggtgcgcttcatccgggcgaaagaaccccgtattggcaaatattgacggccagttaagccattcatgccagtaggcgcgcggacgaaagtaaacccactggtgataccattcgcgagcctccggatgacgaccgtagtgatgaatctctcctggcgggaacagcaaaatatcacccggtcggcaaacaaattctcgtccctgatttttcaccaccccctgaccgcgaatggtgagattgagaatataacctttcattcccagcggtcggtcgataaaaaaatcgagataaccgttggcctcaatcggcgttaaacccgccaccagatgggcattaaacgagtatcccggcagcaggggatcattttgcgcttcagccatacttttcatactcccgccattcagagaagaaaccaattgtccatattgcatcagacattgccgtcactgcgtcttttactggctcttctcgctaaccaaaccggtaaccccgcttattaaaagcattctgtaacaaagcgggaccaaagccatgacaaaaacgcgtaacaaaagtgtctataatcacggcagaaaagtccacattgattatttgcacggcgtcacactttgctatgccatagcatttttatccataagattagcggatcctacctgacgctttttatcgcaactctctactgtttctccatacccgtttttttgggaattcgagctctaaggaggttataaaaaatggatattaatactgaaactgagatcaagcaaaagcattcactaaccccctttcctgttttcctaatcagcccggcatttcgcgggcgatattttcacagctatttcaggagttcagccatgaacgcttattacattcaggatcgtcttgaggctcagagctgggcgcgtcactaccagcagctcgcccgtgaagagaaagaggcagaactggcagacgacatggaaaaaggcctgccccagcacctgtttgaatcgctatgcatcgatcatttgcaacgccacggggccagcaaaaaatccattacccgtgcgtttgatgacgatgttgagtttcaggagcgcatggcagaacacatccggtacatggttgaaaccattgctcaccaccaggttgatattgattcagaggtataaaacgaatgagtactgcactcgcaacgctggctgggaagctggctgaacgtgtcggcatggattctgtcgacccacaggaactgatcaccactcttcgccagacggcatttaaaggtgatgccagcgatgcgcagttcatcgcattactgatcgttgccaaccagtacggccttaatccgtggacgaaagaaatttacgcctttcctgataagcagaatggcatcgttccggtggtgggcgttgatggctggtcccgcatcatcaatgaaaaccagcagtttgatggcatggactttgagcaggacaatgaatcctgtacatgccggatttaccgcaaggaccgtaatcatccgatctgcgttaccgaatggatggatgaatgccgccgcgaaccattcaaaactcgcgaaggcagagaaatcacggggccgtggcagtcgcatcccaaacggatgttacgtcataaagccatgattcagtgtgcccgtctggccttcggatttgctggtatctatgacaaggatgaagccgagcgcattgtcgaaaatactgcatacactgcagaacgtcagccggaacgcgacatcactccggttaacgatgaaaccatgcaggagattaacactctgctgatcgccctggataaaacatgggatgacgacttattgccgctctgttcccagatatttcgccgcgacattcgtgcatcgtcagaactgacacaggccgaagcagtaaaagctcttggattcctgaaacagaaagccgcagagcagaaggtggcagcatgacaccggacattatcctgcagcgtaccgggatcgatgtgagagctgtcgaacagggggatgatgcgtggcacaaattacggctcggcgtcatcaccgcttcagaagttcacaacgtgatagcaaaaccccgctccggaaagaagtggcctgacatgaaaatgtcctacttccacaccctgcttgctgaggtttgcaccggtgtggctccggaagttaacgctaaagcactggcctggggaaaacagtacgagaacgacgccagaaccctgtttgaattcacttccggcgtgaatgttactgaatccccgatcatctatcgcgacgaaagtatgcgtaccgcctgctctcccgatggtttatgcagtgacggcaacggccttgaactgaaatgcccgtttacctcccgggatttcatgaagttccggctcggtggtttcgaggccataaagtcagcttacatggcccaggtgcagtacagcatgtgggtgacgcgaaaaaatgcctggtactttgccaactatgacccgcgtatgaagcgtgaaggcctgcattatgtcgtgattgagcgggatgaaaagtacatggcgagttttgacgagatcgtgccggagttcatcgaaaaaatggacgaggcactggctgaaattggttttgtatttggggagcaatggcgatgacgcatcctcacgataatatccgggtaggcgcaatcactttcgtctactccgttacaaagcgaggctgggtatttcccggcctttctgttatccgaaatccactgaaagcacagcggctggctgaggagataaataataaacgaggggctgtatgcacaaagcatcttctgttgagttaagaacgagtatcgagatggcacatagccttgctcaaattggaatcaggtttgtgccaataccagtagaaacagacgaagaatccatgggtatggacagttttccctttgatatgtaacggtgaacagttgttctacttttgtttgttagtcttgatgcttcactgatagatacaagagccataagaacctcagatccttccgtatttagccagtatgttctctagtgtggttcgttgtttttgcgtgagccatgagaacgaaccattgagatcatacttactttgcatgtcactcaaaaattttgcctcaaaactggtgagctgaatttttgcagttaaagcatcgtgtagtgtttttcttagtccgttacgtaggtaggaatctgatgtaatggttgttggtattttgtcaccattcatttttatctggttgttctcaagttcggttacgagatccatttgtctatctagttcaacttggaaaatcaacgtatcagtcgggcggcctcgcttatcaaccaccaatttcatattgctgtaagtgtttaaatctttacttattggtttcaaaacccattggttaagccttttaaactcatggtagttattttcaagcattaacatgaacttaaattcatcaaggctaatctctatatttgccttgtgagttttcttttgtgttagttcttttaataaccactcataaatcctcatagagtatttgttttcaaaagacttaacatgttccagattatattttatgaatttttttaactggaaaagataaggcaatatctcttcactaaaaactaattctaatttttcgcttgagaacttggcatagtttgtccactggaaaatctcaaagcctttaaccaaaggattcctgatttccacagttctcgtcatcagctctctggttgctttagctaatacaccataagcattttccctactgatgttcatcatctgagcgtattggttataagtgaacgataccgtccgttctttccttgtagggttttcaatcgtggggttgagtagtgccacacagcataaaattagcttggtttcatgctccgttaagtcatagcgactaatcgctagttcatttgctttgaaaacaactaattcagacatacatctcaattggtctaggtgattttaatcactataccaattgagatgggctagtcaatgataattactagtccttttcctttgagttgtgggtatctgtaaattctgctagacctttgctggaaaacttgtaaattctgctagaccctctgtaaattccgctagacctttgtgtgttttttttgtttatattcaagtggttataatttatagaataaagaaagaataaaaaaagataaaaagaatagatcccagccctgtgtataactcactactttagtcagttccgcagtattacaaaaggatgtcgcaaacgctgtttgctcctctacaaaacagaccttaaaaccctaaaggcttaagtagcaccctcgcaagctcggttgcggccgcaatcgggcaaatcgctgaatattccttttgtctccgaccatcaggcacctgagtcgctgtctttttcgtgacattcagttcgctgcgctcacggctctggcagtgaatgggggtaaatggcactacaggcgccttttatggattcatgcaaggaaactacccataatacaagaaaagcccgtcacgggcttctcagggcgttttatggcgggtctgctatgtggtgctatctgactttttgctgttcagcagttcctgccctctgattttccagtctgaccacttcggattatcccgtgacaggtcattcagactggctaatgcacccagtaaggcagcggtatcatcaacggggtctgacgctcagtggaacgaaaactcacgttaagggattttggtcatgagattatcaaaaaggatcttcacctagatccttttaaattaaaaatgaagttttaaatcaatctaaagtatatatgagtaaacttggtctgacagttaccaatgcttaatcagtgaggcacctatctcagcgatctgtctatttcgttcatccatagttgcctgactccccgtcgtgtagataactacgatacgggagggcttaccatctggccccagtgctgcaatgataccgcgagacccacgctcaccggctccagatttatcagcaataaaccagccagccggaagggccgagcgcagaagtggtcctgcaactttatccgcctccatccagtctattaattgttgccgggaagctagagtaagtagttcgccagttaatagtttgcgcaacgttgttgccattgctacaggcatcgtggtgtcacgctcgtcgtttggtatggcttcattcagctccggttcccaacgatcaaggcgagttacatgatcccccatgttgtgcaaaaaagcggttagctccttcggtcctccgatcgttgtcagaagtaagttggccgcagtgttatcactcatggttatggcagcactgcataattctcttactgtcatgccatccgtaagatgcttttctgtgactggtgagtactcaaccaagtcattctgagaatagtgtatgcggcgaccgagttgctcttgcccggcgtcaatacgggataataccgcgccacatagcagaactttaaaagtgctcatcattggaaaacgttcttcggggcgaaaactctcaaggatcttaccgctgttgagatccagttcgatgtaacccactcgtgcacccaactgatcttcagcatcttttactttcaccagcgtttctgggtgagcaaaaacaggaaggcaaaatgccgcaaaaaagggaataagggcgacacggaaatgttgaatactcatactcttcctttttcaatattattgaagcatttatcagggttattgtctcatgagcggatacatatttgaatgtatttagaaaaataaacaaataggggttccgcgcacatttccccgaaaagtgccacctg

SEQ ID NO: 219 - DNA, 22 bp, Artificial Sequence
  asd-1 primer
ccttcctaacgcaaattccctg

SEQ ID NO: 220 - DNA, 22 bp, Artificial Sequence
  asd-2 primer
ccaatgctctgcttaactcctg

SEQ ID NO: 221 - DNA, 21 bp, Artificial Sequence
  asd-3 primer
gcctcgccatgtttcagtacg

SEQ ID NO: 222 - DNA, 21 bp, Artificial Sequence
  asd-4 primer
ggtctggtgcattccgagtac

SEQ ID NO: 223 - DNA, 23 bp, Artificial Sequence
  scFv-3 primer
cataatctgggtccttggtctgc

SEQ ID NO: 224 - DNA, 5728 bp, Artificial Sequence
  pJW168 plasmid
ttactaatcgccatcttccagcaggcgcaccattgcccctgtttcactatccaggttacggatatagttcatgacaatatttacattggtccagccaccagcttgcatgatctccggtattgaaactccagcgcgggccatatctcgcgcggctccgacacgggcactgtgtccagaccaggccaggtatctctgaccagagtcatccttagcgccgtaaatcaatcgatgagttgcttcaaaaatcccttccagggcgcgagttgatagctggctggtggcagatggcgcggcaacaccattttttctgacccggcaaaacaggtagttattcggatcatcagctacaccagagacggaaatccatcgctcgaccagtttagttacccccaggctaagtgccttctctacacctgcggtgctaaccagcgttttcgttctgccaatatggattaacattctcccaccgtcagtacgtgagatatctttaaccctgatcctggcaatttcggctatacgtaacagggtgttataagcaatccccagaaatgccagattacgtatatcctggcagcgatcgctattttccatgagtgaacgaacctggtcgaaatcagtgcgttcgaacgctagagcctgttttgcacgttcaccggcatcaacgttttcttttcggatccgccgcataaccagtgaaacagcattgctgtcacttggtcgtggcagcccggaccgacgatgaagcatgtttagctggcccaaatgttgctggatagtttttactgccagaccgcgcgcctgaagatatagaagataatcgcgaacatcttcaggttctgcgggaaaccatttccggttattcaacttgcaccatgccgcccacgaccggcaaacggacagaagcattttccaggtatgctcagaaaacgcctggcgatccctgaacatgtccatcaggttcttgcgaacctcatcactcgttgcatcgaccggtaatgcaggcaaattttggtgtacgggcagtaaattggacatgtcaacggtacctgcagtctagagtcgaggcctgtttcctgtgtgaaattgttatccgctcacaattccacacattatacgagccggaagcataaagtgtaaagcctggggtgcctaatgagtgagctgtttcctgtgtgaaattgttatccgctcacaattccacacattatacgagccggaagcataaagtgtaaagcctggggtgcctaatgagtgagctgcctcgcgcgtttcggtgatgacggtgaaaacctctgacacatgcagctcccggagacggtcacagcttgtctgtaagcggatgccgggagcagacaagcccgtcagggcgcgtcagcgggtgttggcgggtgtcggggcgcagccatgacccagtcacgtagcgatagacggagtgtatccgacaccatcgaatggtgcaaaacctttcgcggtatggcatgatagcgcccggaagagagtcaattcagggtggtgaatgtgaaaccagtaacgttatacgatgtcgcagagtatgccggtgtctcttatcagaccgtttcccgcgtggtgaaccaggccagccacgtttctgcgaaaacgcgggaaaaagtggaagcggcgatggcggagctgaattacattcccaaccgcgtggcacaacaactggcgggcaaacagtcgttgctgattggcgttgccacctccagtctggccctgcacgcgccgtcgcaaattgtcgcggcgattaaatctcgcgccgatcaactgggtgccagcgtggtggtgtcgatggtagaacgaagcggcgtcgaagcctgtaaagcggcggtgcacaatcttctcgcgcaacgcgtcagtgggctgatcattaactatccgctggatgaccaggatgccattgctgtggaagctgcctgcactaatgttccggcgttatttcttgatgtctctgaccagacacccatcaacagtattattttctcccatgaagacggtacgcgactgggcgtggagcatctggtcgcattgggtcaccagcaaatcgcgctgttagcgggcccattaagttctgtctcggcgcgtctgcgtctggctggctggcataaatatctcactcgcaatcaaattcagccgatagcggaacgggaaggcgactggagtgccatgtccggttttcaacaaaccatgcaaatgctgaatgagggcatcgttcccactgcgatgctggttgccaacgatcagatggcgctgggcgcaatgcgcgccattaccgagtccgggctgcgcgttggtgcggatatctcggtagtgggatacgacgataccgaagacagctcatgttatatcccgccgttaaccaccatcaaacaggattttcgcctgctggggcaaaccagcgtggaccgcttgctgcaactctctcagggccaggcggtgaagggcaatcagctgttgcccgtctcactggtgaaaagaaaaaccaccctggcgcccaatacgcaaaccgcctctccccgcgcgttggccgattcattaatgcagctggcacgacaggtttcccgactggaaagcgggcagtgagcgcaacgcaatcaatgtgagttagctcactcattaggcaccccaggctttacactttatgcttccgaccatactggcttaactatgcggcatcagagcagattgtactgagagtgcaccatcgatgcaggtggcacttttcggggaaatgtgcgcggaacccctatttgtttatttttctaaatacattcaaatatgtatccgctcatgagacaataaccctgataaatgcttcaataatattgaaaaaggaagagtatgagtattcaacatttccgtgtcgcccttattcccttttttgcggcattttgccttcctgtttttgctcacccagaaacgctggtgaaagtaaaagatgctgaagatcagttgggtgcacgagtgggttacatcgaactggatctcaacagcggtaagatccttgagagttttcgccccgaagaacgttttccaatgatgagcacttttaaagttctgctatgtggcgcggtattatcccgtattgacgccgggcaagagcaactcggtcgccgcatacactattctcagaatgacttggttgagtactcaccagtcacagaaaagcatcttacggatggcatgacagtaagagaattatgcagtgctgccataaccatgagtgataacactgcggccaacttacttctgacaacgatcggaggaccgaaggagctaaccgcttttttgcacaacatgggggatcatgtaactcgccttgatcgttgggaaccggagctgaatgaagccataccaaacgacgagcgtgacaccacgatgcctgtagcaatggcaacaacgttgcgcaaactattaactggcgaactacttactctagcttcccggcaacaattaatagactggatggaggcggataaagttgcaggaccacttctgcgctcggcccttccggctggctggtttattgctgataaatctggagccggtgagcgtgggtctcgcggtatcattgcagcactggggccagatggtaagccctcccgtatcgtagttatctacacgacggggagtcaggcaactatggatgaacgaaatagacagatcgctgagataggtgcctcactgattaagcattggtaactgtcagaccaagtttactcatatatactttagattgatttaaaacttcatttttaatttaaaaggatctaggtgaagatcctttttgataatctcatgaccaaaatcccttaacgtgagttttcgttccactgagcgtcagaccccgttgatgataccgctgccttactgggtgcattagccagtctgaatgacctgtcacgggataatccgaagtggtcagactggaaaatcagagggcaggaactgctgaacagcaaaaagtcagatagcaccacatagcagacccgccataaaacgccctgagaagcccgtgacgggcttttcttgtattatgggtagtttccttgcatgaatccataaaaggcgcctgtagtgccatttacccccattcactgccagagccgtgagcgcagcgaactgaatgtcacgaaaaagacagcgactcaggtgcctgatggtcggagacaaaaggaatattcagcgatttgcccgattgcggccgcaaccgagcttgcgagggtgctacttaagcctttagggttttaaggtctgttttgtagaggagcaaacagcgtttgcgacatccttttgtaatactgcggaactgactaaagtagtgagttatacacagggctgggatctattctttttatctttttttattctttctttattctataaattataaccacttgaatataaacaaaaaaaacacacaaaggtctagcggaatttacagagggtctagcagaatttacaagttttccagcaaaggtctagcagaatttacagatacccacaactcaaaggaaaaggactagtaattatcattgactagcccatctcaattggtatagtgattaaaatcacctagaccaattgagatgtatgtctgaattagttgttttcaaagcaaatgaactagcgattagtcgctatgacttaacggagcatgaaaccaagctaattttatgctgtgtggcactactcaaccccacgattgaaaaccctacaaggaaagaacggacggtatcgttcacttataaccaatacgttcagatgatgaacatcagtagggaaaatgcttatggtgtattagctaaagcaaccagagagctgatgacgagaactgtggaaatcaggaatcctttggttaaaggctttgagattttccagtggacaaactatgccaagttctcaagcgaaaaattagaattagtttttagtgaagagatattgccttatcttttccagttaaaaaaattcataaaatataatctggaacatgttaagtcttttgaaaacaaatactctatgaggatttatgagtggttattaaaagaactaacacaaaagaaaactcacaaggcaaatatagagattagccttgatgaatttaagttcatgttaatgcttgaaaataactaccatgagtttaaaaggcttaaccaatgggttttgaaaccaataagtaaagatttaaacacttacagcaatatgaaattggtggttgataagcgaggccgcccgactgatacgttgattttccaagttgaactagatagacaaatggatctcgtaaccgaacttgagaacaaccagataaaaatgaatggtgacaaaataccaacaaccattacatcagattcctacctacataacggactaagaaaaacactacacgatgctttaactgcaaaaattcagctcaccagttttgaggcaaaatttttgagtgacatgcaaagtaagyatgatctcaatggttcgttctcatggctcacgcaaaaacaacgaaccacactagagaacatactggctaaatacggaaggatctgaggttcttatggctcttgtatctatcagtgaagcatcaagactaacaaacaaaagtagaacaactgttcaccgttacatatcaaagggaaaactgtccatacccatgggctagctgatcagccagtgccaagcttgctcaatcaatcaccggatcccccgggaattc

SEQ ID NO: 225 - DNA, 3736 bp, Artificial Sequence
  pATIU6 plasmid
gcgcccaatacgcaaaccgcctctccccgcgcgttggccgattcattaatgcagctggcacgacaggtttcccgactggaaagcgggcagtgagcgcaacgcaatggatccaaggtcgggcaggaagagggcctatttcccatgattccttcatatttgcatatacgatacaaggctgttagagagataattagaattaatttgactgtaaacacaaagatattagtacaaaatacgtgacgtagaaagtaataatttcttgggtagtttgcagttttaaaattatgttttaaaatggactatcatatgcttaccgtaacttgaaagtatttcgatttcttggctttatatatcttgtggaaaggacgaaactagttttttctcgagtagctagagaattcttaagccagccccgacacccgccaacacccgctgacgcgccctgacgggcttgtctgctcccggcatccgcttacagacaagctgtgaccgtctccgggagctgcatgtgtcagaggttttcaccgtcatcaccgaaacgcgcgagacgaaagggcctcgtgatacgcctatttttataggttaatgtcatgataataatggtttcttagacgtcaggtggcacttttcggggaaatgtgaagcttcgcggaacccctatttgtttatttttctaaatacattcaaatatgtatccgctcatgagacaataaccctgataaatgcttcaataatattgaaaaaggaagagtatgagtattcaacatttccgtgtcgcccttattcccttttttgcggcattttgccttcctgtttttgctcacccagaaacgctggtgaaagtaaaagatgctgaagatcagttgggtgcacgagtgggttacatcgaactggatctcaacagcggtaagatccttgagagttttcgccccgaagaacgttttccaatgatgagcacttttaaagttctgctatgtggcgcggtattatcccgtattgacgccgggcaagagcaactcggtcgccgcatacactattctcagaatgacttggttgagtactcaccagtcacagaaaagcatcttacggatggcatgacagtaagagaattatgcagtgctgccataaccatgagtgataacactgcggccaacttacttctgacaacgatcggaggaccgaaggagctaaccgcttttttgcacaacatgggggatcatgtaactcgccttgatcgttgggaaccggagctgaatgaagccataccaaacgacgagcgtgacaccacgatgcctgtagcaatggcaacaacgttgcgcaaactattaactggcgaactacttactctagcttcccggcaacaattaatagactggatggaggcggataaagttgcaggaccacttctgcgctcggcccttccggctggctggtttattgctgataaatctggagccggtgagcgtgggtctcgcggtatcattgcagcactggggccagatggtaagccctcccgtatcgtagttatctacacgacggggagtcaggcaactatggatgaacgaaatagacagatcgctgagataggtgcctcactgattaagcattggtaaaagcttctgtcagaccaagtttactcatatatactttagattgatttaaaacttcatttttaatttaaaaggatctaggtgaagatcctttatggtgaaggatgcgccacaggatactggcgcgcatacacagcacatctctttgcaggaaaaaaacgctatgaaaaatgttggttttatcggctggcgcggaatggtcggctctgttctcatgcaacgcatggtagaggagcgcgatttcgacgctattcgccctgttttcttttctacctcccagtttggacaggcggcgcccaccttcggcgacacctccaccggcacgctacaggacgcttttgatctggatgcgctaaaagcgctcgatatcatcgtgacctgccagggcggcgattataccaacgaaatttatccaaagctgcgcgaaagcggatggcagggttactggattgatgcggcttctacgctgcgcatgaaagatgatgccattattattctcgacccggtcaaccaggacgtgattaccgacggcctgaacaatggcgtgaagacctttgtgggcggtaactgtaccgttagcctgatgttgatgtcgctgggcggtctctttgcccataatctcgttgactgggtatccgtcgcgacctatcaggccgcctccggcggcggcgcgcgccatatgcgcgagctgttaacccagatgggtcagttgtatggccatgtcgccgatgaactggcgacgccgtcttccgcaattcttgatattgaacgcaaagttacggcattgacccgcagcggcgagctgccggttgataactttggcgtaccgctggcgggaagcctgatcccctggatcgacaaacagctcgataacggccagagccgcgaagagtggaaaggccaggcggaaaccaacaagattctcaatactgcctctgtgattccggttgatggtttgtgtgtgcgcgtcggcgcgctgcgctgtcacagccaggcgttcaccatcaagctgaaaaaagaggtatccattccgacggtggaagaactgctggcggcacataatccgtgggcgaaagtggtgccgaacgatcgtgatatcactatgcgcgaattaaccccggcggcggtgaccggcacgttgactacgccggttggtcgtctgcgtaagctgaacatggggccagagttcttgtcggcgtttaccgtaggcgaccagttgttatggggcgccgccgagccgctgcgtcgaatgctgcgccagttggcgtagttgataatctcatgaccaaaatcccttaacgtgagttttcgttccactgagcgtcagaccccgtagaaaagatcaaaggatcttcttgagatcctttttttctgcgcgtaatctgctgcttgcaaacaaaaaaaccaccgctaccagcggtggtttgtttgccggatcaagagctaccaactctttttccgaaggtaactggcttcagcagagcgcagataccaaatactgttcttctagtgtagccgtagttaggccaccacttcaagaactctgtagcaccgcctacatacctcgctctgctaatcctgttaccagtggctgctgccagtggcgataagtcgtgtcttaccgggttggactcaagacgatagttaccggataaggcgcagcggtcgggctgaacggggggttcgtgcacacagcccagcttggagcgaacgacctacaccgaactgagatacctacagcgtgagctatgagaaagcgccacgcttcccgaagggagaaaggcggacaggtatccggtaagcggcagggtcggaacaggagagcgcacgagggagcttccagggggaaacgcctggtatctttatagtcctgtcgggtttcgccacctctgacttgagcgtcgatttttgtgatgctcgtcaggggggcggagcctatggaaaaacgccagcaacgcggcctttttacggttcctggccttttgctggccttttgctcacatgttctttcctgcgttatcccctgattctgtggataaccgtattaccgcctttgagtgagctgataccgctcgccgcagccgaacgaccgagcgcagcgagtcagtgagcgaggaagcggaaga

SEQ ID NO: 226 - DNA, 26 bp, Artificial Sequence
  APR-001 Kan PrimerF
aaaaaagcttgcagctctggcccgtg

SEQ ID NO: 227 - DNA, 38 bp, Artificial Sequence
  APR-002 Kan PrimerR
aaaaaagcttttagaaaaactcatcgagcatcaaatga

SEQ ID NO: 228 - DNA, 28 bp, Artificial Sequence
  APR-003 pATI ori T148CF
acactagaaggacagtatttggtatctg

SEQ ID NO: 229 - DNA, 18 bp, Artificial Sequence
  APR-004 pATI ori T148CR
agccgtagttaggccacc

SEQ ID NO: 230 - DNA, 3203 bp, Artificial Sequence
  pSL0147 plasmid
gacgaaagggcctcgtgatacgcctatttttataggttaatgtcatgataataatggtttcttagacgtcaggtggcacttttcggggaaatgtgcgcggaacccctatttgtttatttttctaaatacattcaaatatgtatccgctcatgagacaataaccctgataaatgcttcaataatattgaaaaaggaagagtatgagtattcaacatttccgtgtcgcccttattcccttttttgcggcattttgccttcctgtttttgctcacccagaaacgctggtgaaagtaaaagatgctgaagatcagttgggtgcacgagtgggttacatcgaactggatctcaacagcggtaagatccttgagagttttcgccccgaagaacgttttccaatgatgagcacttttaaagttctgctatgtggcgcggtattatcccgtattgacgccgggcaagagcaactcggtcgccgcatacactattctcagaatgacttggttgagtactcaccagtcacagaaaagcatcttacggatggcatgacagtaagagaattatgcagtgctgccataaccatgagtgataacactgcggccaacttacttctgacaacgatcggaggaccgaaggagctaaccgcttttttgcacaacatgggggatcatgtaactcgccttgatcgttgggaaccggagctgaatgaagccataccaaacgacgagcgtgacaccacgatgcctgtagcaatggcaacaacgttgcgcaaactattaactggcgaactacttactctagcttcccggcaacaattaatagactggatggaggcggataaagttgcaggaccacttctgcgctcggcccttccggctggctggtttattgctgataaatctggagccggtgagcgtgggtctcgcggtatcattgcagcactggggccagatggtaagccctcccgtatcgtagttatctacacgacggggagtcaggcaactatggatgaacgaaatagacagatcgctgagataggtgcctcactgattaagcattggtaactgtcagaccaagtttactcatatatactttagattgatttaaaacttcatttttaatttaaaaggatctaggtgaagatcctttttgataatctcatgaccaaaatcccttaacgtgagttttcgttccactgagcgtcagaccccgtagaaaagatcaaaggatcttcttgagatcctttttttctgcgcgtaatctgctgcttgcaaacaaaaaaaccaccgctaccagcggtggtttgtttgccggatcaagagctaccaactctttttccgaaggtaactggcttcagcagagcgcagataccaaatactgttcttctagtgtagccgtagttaggccaccacttcaagaactctgtagcaccgcctacatacctcgctctgctaatcctgttaccagtggctgctgccagtggcgataagtcgtgtcttaccgggttggactcaagacgatagttaccggataaggcgcagcggtcgggctgaacggggggttcgtgcacacagcccagcttggagcgaacgacctacaccgaactgagatacctacagcgtgagctatgagaaagcgccacgcttcccgaagggagaaaggcggacaggtatccggtaagcggcagggtcggaacaggagagcgcacgagggagcttccagggggaaacgcctggtatctttatagtcctgtcgggtttcgccacctctgacttgagcgtcgatttttgtgatgctcgtcaggggggcggagcctatggaaaaacgccagcaacgcggcctttttacggttcctggccttttgctggccttttgctcacatgttctttcctgcgttatcccctgattctgtggataaccgtattaccgcctttgagtgagctgataccgctcgccgcagccgaacgaccgagcgcagcgagtcagtgagcgaggaagcggaagagcgcccaatacgcaaaccgcctctccccgcgcgttggccgattcattaatgcagctggcacgacaggtttcccgactggaaagcgggcagtgagcgcaacgcaattaatgtgagttagctcactcattaggcaccccaggctttacactttatgcttccggctcgtatgttgtgtggaattgtgagcggataacaatttcacacaggaaacagctatgaccatgattacgccaagctcggcgcgccattgggatggaacgcgttatcggcaatctggaggcaaagtttaatgataattttgcaaaaataatgcgcggaataatgatgcataaagcggctatttcgccgcctaagaaaaagatcgggggaagtgaaaaattttctaaagttcgaaattcaggtgccgatacaagggttacggtgagaaaccgtgggcaacagcccaataacatcaagttgtaattgataaggaaaagatcatgggctagcctcaataagcttcttgcctttctgcagaccaaggacccagattatgttgcagcaggccggtacctccgttctggcgcaggcgaaccaggttccgcaaaacgtcctctctttactgcgttaatccggcgattgattcaccgacacgtggtacacaatcaaggcagcgaaagctgccttttttaattccggagcctgtgtaatgaaagaaatcaccgtcactgaacctgcctttgtcacccgcttttcctgttctggctcggcctgtcgcgaccactgttgtaagggctggaaagttccatcccaatacgcgtcaattcactggccgtcgttttacaacgtcgtgactgggaaaaccctggcgttacccaacttaatcgccttgcagcacatccccctttcgccagctggcgtaatagcgaagaggcccgcaccgatcgcccttcccaacagttgcgcagcctgaatggcgaatggcgcctgatgcggtattttctccttacgcatctgtgcggtatttcacaccgcatatggtgcactctcagtacaatctgctctgatgccgcatagttaagccagccccgacacccgccaacacccgctgacgcgccctgacgggcttgtctgctcccggcatccgcttacagacaagctgtgaccgtctccgggagctgcatgtgtcagaggttttcaccgtcatcaccgaaacgcgcga

SEQ ID NO: 231 - DNA, 3196 bp, Artificial Sequence
  pSL0148 plasmid
gacgaaagggcctcgtgatacgcctatttttataggttaatgtcatgataataatggtttcttagacgtcaggtggcacttttcggggaaatgtgcgcggaacccctatttgtttatttttctaaatacattcaaatatgtatccgctcatgagacaataaccctgataaatgcttcaataatattgaaaaaggaagagtatgagtattcaacatttccgtgtcgcccttattcccttttttgcggcattttgccttcctgtttttgctcacccagaaacgctggtgaaagtaaaagatgctgaagatcagttgggtgcacgagtgggttacatcgaactggatctcaacagcggtaagatccttgagagttttcgccccgaagaacgttttccaatgatgagcacttttaaagttctgctatgtggcgcggtattatcccgtattgacgccgggcaagagcaactcggtcgccgcatacactattctcagaatgacttggttgagtactcaccagtcacagaaaagcatcttacggatggcatgacagtaagagaattatgcagtgctgccataaccatgagtgataacactgcggccaacttacttctgacaacgatcggaggaccgaaggagctaaccgcttttttgcacaacatgggggatcatgtaactcgccttgatcgttgggaaccggagctgaatgaagccataccaaacgacgagcgtgacaccacgatgcctgtagcaatggcaacaacgttgcgcaaactattaactggcgaactacttactctagcttcccggcaacaattaatagactggatggaggcggataaagttgcaggaccacttctgcgctcggcccttccggctggctggtttattgctgataaatctggagccggtgagcgtgggtctcgcggtatcattgcagcactggggccagatggtaagccctcccgtatcgtagttatctacacgacggggagtcaggcaactatggatgaacgaaatagacagatcgctgagataggtgcctcactgattaagcattggtaactgtcagaccaagtttactcatatatactttagattgatttaaaacttcatttttaatttaaaaggatctaggtgaagatcctttttgataatctcatgaccaaaatcccttaacgtgagttttcgttccactgagcgtcagaccccgtagaaaagatcaaaggatcttcttgagatcctttttttctgcgcgtaatctgctgcttgcaaacaaaaaaaccaccgctaccagcggtggtttgtttgccggatcaagagctaccaactctttttccgaaggtaactggcttcagcagagcgcagataccaaatactgttcttctagtgtagccgtagttaggccaccacttcaagaactctgtagcaccgcctacatacctcgctctgctaatcctgttaccagtggctgctgccagtggcgataagtcgtgtcttaccgggttggactcaagacgatagttaccggataaggcgcagcggtcgggctgaacggggggttcgtgcacacagcccagcttggagcgaacgacctacaccgaactgagatacctacagcgtgagctatgagaaagcgccacgcttcccgaagggagaaaggcggacaggtatccggtaagcggcagggtcggaacaggagagcgcacgagggagcttccagggggaaacgcctggtatctttatagtcctgtcgggtttcgccacctctgacttgagcgtcgatttttgtgatgctcgtcaggggggcggagcctatggaaaaacgccagcaacgcggcctttttacggttcctggccttttgctggccttttgctcacatgttctttcctgcgttatcccctgattctgtggataaccgtattaccgcctttgagtgagctgataccgctcgccgcagccgaacgaccgagcgcagcgagtcagtgagcgaggaagcggaagagcgcccaatacgcaaaccgcctctccccgcgcgttggccgattcattaatgcagctggcacgacaggtttcccgactggaaagcgggcagtgagcgcaacgcaattaatgtgagttagctcactcattaggcaccccaggctttacactttatgcttccggctcgtatgttgtgtggaattgtgagcggataacaatttcacacaggaaacagctatgaccatgattacgccaagctcggcgcgccattgggatggaacttccagacgacaagagtatcgcctttatttacatactttaacgctcgtttcaggccggggcggtttgcaatcttgccactgatacggtcctcaaaaatgcggtcacaatttgcactagtaagcgcattacgctgtaaatcgatattttggtcaattgttgacacccgaatatacccaatagtagccatgattttctcctttacatcagataaggaagaattttagtcgcttttctcatggaggattgctgctagcctcaataagcttcttgcctttctgcagaccaaggacccagattatgtatggaatgtatggctgtaaatgatatttcctacgggcgagaagctgaaatatggccgcgggattattctatgcttgctcgtcgagttcaatttctacgttttaatgatatccctgttcgattggtgagtaataatgcccggataatcacaggctacattgcgaagtttaatccgaaggaaaatttgattctggcttcggataaacctaaaggagttccatcccaatacgcgtcaattcactggccgtcgttttacaacgtcgtgactgggaaaaccctggcgttacccaacttaatcgccttgcagcacatccccctttcgccagctggcgtaatagcgaagaggcccgcaccgatcgcccttcccaacagttgcgcagcctgaatggcgaatggcgcctgatgcggtattttctccttacgcatctgtgcggtatttcacaccgcatatggtgcactctcagtacaatctgctctgatgccgcatagttaagccagccccgacacccgccaacacccgctgacgcgccctgacgggcttgtctgctcccggcatccgcttacagacaagctgtgaccgtctccgggagctgcatgtgtcagaggttttcaccgtcatcaccgaaacgcgcga

SEQ ID NO: 232 - DNA, 21 bp, Artificial Sequence
  flic-1 primer
cgttatcggcaatctggaggc

SEQ ID NO: 233 - DNA, 21 bp, Artificial Sequence
  flic-2 primer
ccagcccttacaacagtggtc

SEQ ID NO: 234 - DNA, 24 bp, Artificial Sequence
  flic-3 primer
gtctgtcaacaactggtctaacgg

SEQ ID NO: 235 - DNA, 23 bp, Artificial Sequence
  flic-4 primer
agacggtcctcatccagataagg

SEQ ID NO: 236 - DNA, 22 bp, Artificial Sequence
  fljb-1 primer sequence
ttccagacgacaagagtatcgc

SEQ ID NO: 237 - DNA, 27 bp, Artificial Sequence
  fljb-2 primer
cctttaggtttatccgaagccagaatc

SEQ ID NO: 238 - DNA, 20 bp, Artificial Sequence
  fljb-3 primer
caccaggtttttcacgctgc

SEQ ID NO: 239 - DNA, 20 bp, Artificial Sequence
  fljb-4 primer
acacgcatttacgcctgtcg

SEQ ID NO: 240 - DNA, 1518 bp, Artificial Sequence
  cytoLLO ORF
atgaaagacgcctccgcgtttaacaaggagaactccatcagctccatggccccgcccgcttccccgccggcgagccctaaaaccccgatcgagaaaaagcacgccgacgagattgacaaatatattcaaggtttagactacaataagaacaacgtgctggtgtatcacggcgatgcggtgaccaatgttccgccgcgcaagggctacaaagatggtaacgaatatatcgtggttgagaaaaagaaaaaaagcatcaaccagaacaacgccgatatccaagttgtgaacgccatcagctctttaacctatccgggcgcgctggtgaaagccaacagcgaactggtggaaaaccagcccgatgtgctgccggtgaaacgcgattctttaacgctgagcattgatttaccgggcatgacgaaccaagataacaaaatcgtggtgaagaacgcgaccaagtccaacgtgaacaacgcggtgaacacgctggtggaacgctggaacgaaaaatacgcccaagcttacccgaacgtgagcgcgaagattgactacgacgacgaaatggcctacagcgagagccagctgatcgcgaaattcggcaccgcgttcaaagcggtgaacaactctttaaacgtgaactttggcgcgatcagcgaaggcaaaatgcaagaagaggtgatcagctttaaacaaatctattataacgtgaatgttaacgagccgacgcgtccgagccgctttttcggcaaagcggtgacgaaggaacagctgcaagcgcttggcgtgaacgcggaaaaccctccggcctatatttccagcgtggcgtatggccgccaagtttatctgaagctgagcacgaacagccacagcaccaaagttaaggcggcctttgatgcggcggtgagcggcaaaagcgttagcggcgacgttgagctgacgaacatcatcaagaacagctcctttaaagcggtgatctatggcggtagcgcgaaagacgaagtgcagatcatcgacggcaatttaggtgatctgcgcgatattttaaaaaagggcgccaccttcaaccgtgagacgcccggtgtgccgatcgcctacaccaccaactttttaaaggataacgagctggccgtgatcaaaaacaattccgaatatatcgaaaccacgagcaaggcgtataccgatggcaagatcaacattgaccacagcggtggctatgtggcgcagttcaacatcagctgggatgaagtgaactatgatccggagggcaacgagatcgtgcagcacaagaactggtccgagaacaacaaatccaagctggcgcatttcaccagcagcatctatctgccgggcaacgcgcgcaacattaatgtgtacgcgaaagagtgcacgggtcttgcgtgggaatggtggcgcaccgtgatcgatgatcgcaatttaccgctggtgaaaaaccgcaacatctccatctggggcaccactttatacccgaaatattccaacaaagttgataaccctattgag

SEQ ID NO: 241 - DNA, 45 bp, Artificial Sequence
  LLO promoter
attatgtcttgacatgtagtgagtgggctggtataatgcagcaag

SEQ ID NO: 242 - DNA, 1176 bp, Artificial Sequence
  Asd Gene ORF
ctacgccaactggcgcagcattcgacgcagcggctcggcggcgccccataacaactggtcgcctacggtaaacgccgacaagaactctggccccatgttcagcttacgcagacgaccaaccggcgtagtcaacgtgccggtcaccgccgccggggttaattcgcgcatagtgatatcacgatcgttcggcaccactttcgcccacggattatgtgccgccagcagttcttccaccgtcggaatggatacctcttttttcagcttgatggtgaacgcctggctgtgacagcgcagcgcgccgacgcgcacacacaaaccatcaaccggaatcacagaggcagtattgagaatcttgttggtttccgcctggcctttccactcttcgcggctctggccgttatcgagctgtttgtcgatccaggggatcaggcttcccgccagcggtacgccaaagttatcaaccggcagctcgccgctgcgggtcaatgccgtaactttgcgttcaatatcaagaattgcggaagacggcgtcgccagttcatcggcgacatggccatacaactgacccatctgggttaacagctcgcgcatatggcgcgcgccgccgccggaggcggcctgataggtcgcgacggatacccagtcaacgagattatgggcaaagagaccgcccagcgacatcaacatcaggctaacggtacagttaccgcccacaaaggtcttcacgccattgttcaggccgtcggtaatcacgtcctggttgaccgggtcgagaataataatggcatcatctttcatgcgcagcgtagaagccgcatcaatccagtaaccctgccatccgctttcgcgcagctttggataaatttcgttggtataatcgccgccctggcaggtcacgatgatatcgagcgcttttagcgcatccagatcaaaagcgtcctgtagcgtgccggtggaggtgtcgccgaaggtgggcgccgcctgtccaaactgggaggtagaaaagaaaacagggcgaatagcgtcgaaatcgcgctcctctaccatgcgttgcatgagaacagagccgaccattccgcgccagccgataaaaccaacatttttcatagcgtttttttcctgcaaagagatgtgctgtgtatgcgcgccagtatcctgtggcgcatccttcaccat

SEQ ID NO: 243 - DNA, 589 bp, Artificial Sequence
  pBR322 Origin
ttgagatcctttttttctgcgcgtaatctgctgcttgcaaacaaaaaaaccaccgctaccagcggtggtttgtttgccggatcaagagctaccaactctttttccgaaggtaactggcttcagcagagcgcagataccaaatactgtccttctagtgtagccgtagttaggccaccacttcaagaactctgtagcaccgcctacatacctcgctctgctaatcctgttaccagtggctgctgccagtggcgataagtcgtgtcttaccgggttggactcaagacgatagttaccggataaggcgcagcggtcgggctgaacggggggttcgtgcacacagcccagcttggagcgaacgacctacaccgaactgagatacctacagcgtgagctatgagaaagcgccacgcttcccgaagggagaaaggcggacaggtatccggtaagcggcagggtcggaacaggagagcgcacgagggagcttccagggggaaacgcctggtatctttatagtcctgtcgggtttcgccacctctgacttgagcgtcgatttttgtgatgctcgtcaggggggcggagcctatggaaa

SEQ ID NO: 244 - DNA, 3269 bp, Artificial Sequence
  pEQU6 shSCR
ctttcctgcgttatcccctgattctgtggataaccgtattaccgcctttgagtgagctgataccgctcgccgcagccgaacgaccgagcgcagcgagtcagtgagcgaggaagcggaagagcgcccaatacgcaaaccgcctctccccgcgcgttggccgattcattaatgcagctggcacgacaggtttcccgactggaaagcgggcagtgagcgcaacgcaattaatacgcgtaccgctagccaggaagagtttgtagaaacgcaaaaaggccatccgtcaggatggccttctgcttagtttgatgcctggcagtttatggcgggcgtcctgcccgccaccctccgggccgttgcttcacaacgttcaaatccgctcccggcggatttgtcctactcaggagagcgttcaccgacaaacaacagataaaacgaaaggcccagtcttccgactgagcctttcgttttatttgatgcctggcagttccctactctcgcgttaacgctagcatggatgttttcccagtcacgacgttgtaaaacgacggccagtcttaagctcgggccccaaataatgattttattttgactgatagtgacctgttcgttgcaacaaattgatgagcaatgcttttttataatgccaactttgtacaaaaaagcaggctttaaaggaaccaattcagtcgactggatccaaggtcgggcaggaagagggcctatttcccatgattccttcatatttgcatatacgatacaaggctgttagagagataattagaattaatttgactgtaaacacaaagatattagtacaaaatacgtgacgtagaaagtaataatttcttgggtagtttgcagttttaaaattatgttttaaaatggactatcatatgcttaccgtaacttgaaagtatttcgatttcttggctttatatatcttgtggaaaggacgaaactagcaacaagatgaagagcaccaattctagagattggtgctcttcatcttgttgttttttcgagtagctagagaattcatggtaatagcgatgactaatacgtagatgtactgccaagtaggaaagtcccataaggtcatgtactgggcataatgccaggcgggccatttaccgtcattgacgtcaatagggggcgtacttggcatatgatacacttgatgtactgccaagtgggcagtttaccgtaaatagtccacccattgacgtcaatggaaagtccctattggcgttactatgggaacatacgtcattattgacgtcaatgggcgggggtcgttgggcggtcagccaggcgggccatttaccgtaagttatgtaacgcggaactccatatatgggctatgaactaatgaccccgtaattgattactattaataactagacccagctttcttgtacaaagttggcattataagaaagcattgcttatcaatttgttgcaacgaacaggtcactatcagtcaaaataaaatcattatttgccatccagctgatatcccctatagtgagtcgtattacatggtcatagctgtttcctggcagctctggcccgtgtctcaaaatctctgatgttacattgcacaagataaaaatatatcatcatgaacaataaaactgtctgcttacataaacagtaatacaaggggtgttatgagccatattcaacgggaaacgtcgaggccgcgattaaattccaacatggatgctgatttatatgggtataaatgggctcgcgataatgtcgggcaatcaggtgcgacaatctatcgcttgtatgggaagcccgatgcgccagagttgtttctgaaacatggcaaaggtagcgttgccaatgatgttacagatgagatggtcagactaaactggctgacggaatttatgcctcttccgaccatcaagcattttatccgtactcctgatgatgcatggttactcaccactgcgatccccggaaaaacagcattccaggtattagaagaatatcctgattcaggtgaaaatattgttgatgcgctggcagtgttcctgcgccggttgcattcgattcctgtttgtaattgtccttttaacagcgatcgcgtatttcgtctcgctcaggcgcaatcacgaatgaataacggtttggttgatgcgagtgattttgatgacgagcgtaatggctggcctgttgaacaagtctggaaagaaatgcataaacttttgccattctcaccggattcagtcgtcactcatggtgatttctcacttgataaccttatttttgacgaggggaaattaataggttgtattgatgttggacgagtcggaatcgcagaccgataccaggatcttgccatcctatggaactgcctcggtgagttttctccttcattacagaaacggctttttcaaaaatatggtattgataatcctgatatgaataaattgcagtttcatttgatgctcgatgagtttttctaatcagaattggttaattggttgtaacactggcagagcattacgctgacttgacgggacggcgcaagctcatgaccaaaatcccttaacgtgagttacgcgtcgttccactgagcgtcagaccccgtagaaaagatcaaaggatcttcttgagatcctttttttctgcgcgtaatctgctgcttgcaaacaaaaaaaccaccgctaccagcggtggtttgtttgccggatcaagagctaccaactctttttccgaaggtaactggcttcagcagagcgcagataccaaatactgtccttctagtgtagccgtagttaggccaccacttcaagaactctgtagcaccgcctacatacctcgctctgctaatcctgttaccagtggctgctgccagtggcgataagtcgtgtcttaccgggttggactcaagacgatagttaccggataaggcgcagcggtcgggctgaacggggggttcgtgcacacagcccagcttggagcgaacgacctacaccgaactgagatacctacagcgtgagcattgagaaagcgccacgcttcccgaagggagaaaggcggacaggtatccggtaagcggcagggtcggaacaggagagcgcacgagggagcttccagggggaaacgcctggtatctttatagtcctgtcgggtttcgccacctctgacttgagcgtcgatttttgtgatgctcgtcaggggggcggagcctatggaaaaacgccagcaacgcggcctttttacggttcctggccttttgctggccttttgct

SEQ ID NO: 245 - DNA, 4642 bp, Artificial Sequence
  pATI2.0 U6-H1 Plasmid
accggtctgtggaatgtgtgtcagttagggtgtggaaagtccccaggctccccagcaggcagaagtatgcaaagcatgcatctcaattagtcagcaaccaaccggtcttgcacctcagcaaaaggccatccgtcaggatggccttctgcttagtttgatgcctggcagtttatggcgggcgtcctgcccgccaccctccgggccgttgcttcacaacgttcaaatccgctcccggcggatttgtcctactcaggagagcgttcaccgacaaacaacagataaaacgaaaggcccagtcttccgactgagcctttcgttttatttgggccggccatgcctggcagttccctactctcgcgttaacgctagcatggatgttttcccagtcacgacgttcttaagctcgggcccttaaaggaaccaattcagtcgagaattactagtggtaccatatttgcatgtcgctatgtgttctgggaaatcaccataaacgtgaaatgtctttggatttgggaatcttataagttctgtatgagaccactccctaggtttttgtcgacagatctggcgcgccgactaccaaaatgacttcggatatgaccattatggtgcccgacttcgtaatttacgcgtacccatttggatgacggtgcgtccatgtttgttctgcatgcctgagatagtaaggccgacccccaacaatccacaaggccacgattgacacatgaggttccttttttaaacctgaacctttagttcacacaggtggctgcgccgccgtgaatggtggcagtagttacttctaatcaagctcaatccctcggctctgaagaggacatagtagacctcatctggtctttcgactacggggggtaacagatgtcggtggtataacaatcctccacgagatcatttcacgtaagcatgacttttacacctatcggaatcatataactgttaggcaatggtttatgattgggcgacagacgtcagatcggcgaacctttacgtagccccccgttcatctagacaggaagagggcctatttcccatgattccttcatatttgcatatacgatacaaggctgttagagagataattagaattaatttgactgtaaacacaaagatattagtacaaaatacgtgacgtagaaagtaataatttcttgggtagtttgcagttttaaaattatgttttaaaatggactatcatatgcttaccgtaacttgaaagtatttcgatttcttggctttatatatcttgtggaaaggacgaaacttgttttttctcgagtagctagagaattcgtcgacggaactccatatatgggctatgaactaatgaccccgtaattgattactattaataactagccatccagctgatatccgccggcgctgcagctacgccaactggcgcagcattcgacgcagcggctcggcggcgccccataacaactggtcgcctacggtaaacgccgacaagaactctggccccatgttcagcttacgcagacgaccaaccggcgtagtcaacgtgccggtcaccgccgccggggttaattcgcgcatagtgatatcacgatcgttcggcaccactttcgcccacggattatgtgccgccagcagttcttccaccgtcggaatggatacctcttttttcagcttgatggtgaacgcctggctgtgacagcgcagcgcgccgacgcgcacacacaaaccatcaaccggaatcacagaggcagtattgagaatcttgttggtttccgcctggcctttccactcttcgcggctctggccgttatcgagctgtttgtcgatccaggggatcaggcttcccgccagcggtacgccaaagttatcaaccggcagctcgccgctgcgggtcaatgccgtaactttgcgttcaatatcaagaattgcggaagacggcgtcgccagttcatcggcgacatggccatacaactgacccatctgggttaacagctcgcgcatatggcgcgcgccgccgccggaggcggcctgataggtcgcgacggatacccagtcaacgagattatgggcaaagagaccgcccagcgacatcaacatcaggctaacggtacagttaccgcccacaaaggtcttcacgccattgttcaggccgtcggtaatcacgtcctggttgaccgggtcgagaataataatggcatcatctttcatgcgcagcgtagaagccgcatcaatccagtaaccctgccatccgctttcgcgcagctttggataaatttcgttggtataatcgccgccctggcaggtcacgatgatatcgagcgcttttagcgcatccagatcaaaagcgtcctgtagcgtgccggtggaggtgtcgccgaaggtgggcgccgcctgtccaaactgggaggtagaaaagaaaacagggcgaatagcgtcgaaatcgcgctcctctaccatgcgttgcatgagaacagagccgaccattccgcgccagccgataaaaccaacatttttcatagcgtttttttcctgcaaagagatgtgctgtgtatgcgcgccagtatcctgtggcgcatccttcaccataaaggatcttcacctagatccttttaaattaaaaatgaagttttaaatcaatctaaagtatatatgagtaaacttggtctgacagtctgcaggatatcccatgggcattggcgcagaaaaaaatgcctgatgcgacgctgcgcgtcttatactcccacatatgccagattcagcaacggatacggcttccccaacttgcccacttccatacgtgtcctccttaccagaaatttatccttaaccatggaagctttgcagctctggcccgtgtctcaaaatctctgatgttacattgcacaagataaaaatatatcatcatgaacaataaaactgtctgcttacataaacagtaatacaaggggtgttatgagccatattcaacgggaaacgtcgaggccgcgattaaattccaacatggatgctgatttatatgggtataaatgggctcgcgataatgtcgggcaatcaggtgcgacaatctatcgcttgtatgggaagcccgatgcgccagagttgtttctgaaacatggcaaaggtagcgttgccaatgatgttacagatgagatggtcagactaaactggctgacggaatttatgcctcttccgaccatcaagcattttatccgtactcctgatgatgcatggttactcaccactgcgatccccggaaaaacagcattccaggtattagaagaatatcctgattcaggtgaaaatattgttgatgcgctggcagtgttcctgcgccggttgcattcgattcctgtttgtaattgtccttttaacagcgatcgcgtatttcgtctcgctcaggcgcaatcacgaatgaataacggtttggttgatgcgagtgattttgatgacgagcgtaatggctggcctgttgaacaagtctggaaagaaatgcataaacttttgccattctcaccggattcagtcgtcactcatggtgatttctcacttgataaccttatttttgacgaggggaaattaataggttgtattgatgttggacgagtcggaatcgcagaccgataccaggatcttgccatcctatggaactgcctcggtgagttttctccttcattacagaaacggctttttcaaaaatatggtattgataatcctgatatgaataaattgcagtttcatttgatgctcgatgagtttttctaaagctttcagaattggttaattggttgtaacactggcagagcattacgctgacttgacgggacggcgcaagctcatggatcccaattggcggccgcttaattaaacatgtgagctcgatgtacattcgaaggaccccaaaatcccttaacgtgagttacgcgtcgttccactgagcgtcagaccccgtagaaaagatcaaaggatcttcatcgatttgagatcctttttttctgcgcgtaatctgctgcttgcaaacaaaaaaaccaccgctaccagcggtggtttgtttgccggatcaagagctaccaactctttttccgaaggtaactggcttcagcagagcgcagataccaaatactgtccttctagtgtagccgtagttaggccaccacttcaagaactctgtagcaccgcctacatacctcgctctgctaatcctgttaccagtggctgctgccagtggcgataagtcgtgtcttaccgggttggactcaagacgatagttaccggataaggcgcagcggtcgggctgaacggggggttcgtgcacacagcccagcttggagcgaacgacctacaccgaactgagatacctacagcgtgagctatgagaaagcgccacgcttcccgaagggagaaaggcggacaggtatccggtaagcggcagggtcggaacaggagagcgcacgagggagcttccagggggaaacgcctggtatctttatagtcctgtcgggtttcgccacctctgacttgagcgtcgatttttgtgatgctcgtcaggggggcggagcctatggaaaatcgattccggaaacgccaggctcttccaacgcggcctttttacggttgaagagccctggccttttgctggccttttgct

SEQ ID NO: 246 - DNA, 1261 bp, Artificial Sequence
  ASD gene orf + 85 bp upstream
ctgtcagaccaagtttactcatatatactttagattgatttaaaacttcatttttaatttaaaaggatctaggtgaagatcctttatggtgaaggatgcgccacaggatactggcgcgcatacacagcacatctctttgcaggaaaaaaacgctatgaaaaatgttggttttatcggctggcgcggaatggtcggctctgttctcatgcaacgcatggtagaggagcgcgatttcgacgctattcgccctgttttcttttctacctcccagtttggacaggcggcgcccaccttcggcgacacctccaccggcacgctacaggacgcttttgatctggatgcgctaaaagcgctcgatatcatcgtgacctgccagggcggcgattataccaacgaaatttatccaaagctgcgcgaaagcggatggcagggttactggattgatgcggcttctacgctgcgcatgaaagatgatgccattattattctcgacccggtcaaccaggacgtgattaccgacggcctgaacaatggcgtgaagacctttgtgggcggtaactgtaccgttagcctgatgttgatgtcgctgggcggtctctttgcccataatctcgttgactgggtatccgtcgcgacctatcaggccgcctccggcggcggcgcgcgccatatgcgcgagctgttaacccagatgggtcagttgtatggccatgtcgccgatgaactggcgacgccgtcttccgcaattcttgatattgaacgcaaagttacggcattgacccgcagcggcgagctgccggttgataactttggcgtaccgctggcgggaagcctgatcccctggatcgacaaacagctcgataacggccagagccgcgaagagtggaaaggccaggcggaaaccaacaagattctcaatactgcctctgtgattccggttgatggtttgtgtgtgcgcgtcggcgcgctgcgctgtcacagccaggcgttcaccatcaagctgaaaaaagaggtatccattccgacggtggaagaactgctggcggcacataatccgtgggcgaaagtggtgccgaacgatcgtgatatcactatgcgcgaattaaccccggcggcggtgaccggcacgttgactacgccggttggtcgtctgcgtaagctgaacatggggccagagttcttgtcggcgtttaccgtaggcgaccagttgttatggggcgccgccgagccgctgcgtcgaatgctgcgccagttggcgtag

SEQ ID NO: 247 - DNA, 4112 bp, Artificial Sequence
  pATI2.0 synthetic v26 scramble pBR322ori.dna
accggtctgtggaatgtgtgtcagttagggtgtggaaagtccccaggctccccagcaggcagaagtatgcaaagcatgcatctcaattagtcagcaaccaaccggtcttgcacctcagcaaaaggccatccgtcaggatggccttctgcttagtttgatgcctggcagtttatggcgggcgtcctgcccgccaccctccgggccgttgcttcacaacgttcaaatccgctcccggcggatttgtcctactcaggagagcgttcaccgacaaacaacagataaaacgaaaggcccagtcttccgactgagcctttcgttttatttgggccggccatgcctggcagttccctactctcgcgttaacgctagcatggatgttttcccagtcacgacgttcttaagctcgggcccttaaaggaaccaattcagtcgagaattactagtggtacccaggaagagggcctatttcccatgattccttcatatttgcatatacgatacaaggctgttagagagataattagaattaatttgactgtaaacacaaagatattagtacaaaatacgtgacgtagaaagtaataatttcttgggtagtttgcagttttaaaattatgttttaaaatggactatcatatgcttaccgtaacttgaaagtatttcgatttcttggctttatatatcttgtggaaaggacgaaactagcaacaagatgaagagcaccaattctagagattggtgctcttcatcttgttgtttttctcgagtagctagagaattcgtcgacggaactccatatatgggctatgaactaatgaccccgtaattgattactattaataactagccatccagctgatatccgccggcgctgcagctacgccaactggcgcagcattcgacgcagcggctcggcggcgccccataacaactggtcgcctacggtaaacgccgacaagaactctggccccatgttcagcttacgcagacgaccaaccggcgtagtcaacgtgccggtcaccgccgccggggttaattcgcgcatagtgatatcacgatcgttcggcaccactttcgcccacggattatgtgccgccagcagttcttccaccgtcggaatggatacctcttttttcagcttgatggtgaacgcctggctgtgacagcgcagcgcgccgacgcgcacacacaaaccatcaaccggaatcacagaggcagtattgagaatcttgttggtttccgcctggcctttccactcttcgcggctctggccgttatcgagctgtttgtcgatccaggggatcaggcttcccgccagcggtacgccaaagttatcaaccggcagctcgccgctgcgggtcaatgccgtaactttgcgttcaatatcaagaattgcggaagacggcgtcgccagttcatcggcgacatggccatacaactgacccatctgggttaacagctcgcgcatatggcgcgcgccgccgccggaggcggcctgataggtcgcgacggatacccagtcaacgagattatgggcaaagagaccgcccagcgacatcaacatcaggctaacggtacagttaccgcccacaaaggtcttcacgccattgttcaggccgtcggtaatcacgtcctggttgaccgggtcgagaataataatggcatcatctttcatgcgcagcgtagaagccgcatcaatccagtaaccctgccatccgctttcgcgcagctttggataaatttcgttggtataatcgccgccctggcaggtcacgatgatatcgagcgcttttagcgcatccagatcaaaagcgtcctgtagcgtgccggtggaggtgtcgccgaaggtgggcgccgcctgtccaaactgggaggtagaaaagaaaacagggcgaatagcgtcgaaatcgcgctcctctaccatgcgttgcatgagaacagagccgaccattccgcgccagccgataaaaccaacatttttcatagcgtttttttcctgcaaagagatgtgctgtgtatgcgcgccagtatcctgtggcgcatccttcaccataaaggatcttcacctagatccttttaaattaaaaatgaagttttaaatcaatctaaagtatatatgagtaaacttggtctgacagtctgcaggatatcccatgggcattggcgcagaaaaaaatgcctgatgcgacgctgcgcgtcttatactcccacatatgccagattcagcaacggatacggcttccccaacttgcccacttccatacgtgtcctccttaccagaaatttatccttaaccatggaagctttgcagctctggcccgtgtctcaaaatctctgatgttacattgcacaagataaaaatatatcatcatgaacaataaaactgtctgcttacataaacagtaatacaaggggtgttatgagccatattcaacgggaaacgtcgaggccgcgattaaattccaacatggatgctgatttatatgggtataaatgggctcgcgataatgtcgggcaatcaggtgcgacaatctatcgcttgtatgggaagcccgatgcgccagagttgtttctgaaacatggcaaaggtagcgttgccaatgatgttacagatgagatggtcagactaaactggctgacggaatttatgcctcttccgaccatcaagcattttatccgtactcctgatgatgcatggttactcaccactgcgatccccggaaaaacagcattccaggtattagaagaatatcctgattcaggtgaaaatattgttgatgcgctggcagtgttcctgcgccggttgcattcgattcctgtttgtaattgtccttttaacagcgatcgcgtatttcgtctcgctcaggcgcaatcacgaatgaataacggtttggttgatgcgagtgattttgatgacgagcgtaatggctggcctgttgaacaagtctggaaagaaatgcataaacttttgccattctcaccggattcagtcgtcactcatggtgatttctcacttgataaccttatttttgacgaggggaaattaataggttgtattgatgttggacgagtcggaatcgcagaccgataccaggatcttgccatcctatggaactgcctcggtgagttttctccttcattacagaaacggctttttcaaaaatatggtattgataatcctgatatgaataaattgcagtttcatttgatgctcgatgagtttttctaaagctttcagaattggttaattggttgtaacactggcagagcattacgctgacttgacgggacggcgcaagctcatggatcccaattggcggccgcttaattaaacatgtgagctcgatgtacattcgaaggaccccaaaatcccttaacgtgagttacgcgtcgttccactgagcgtcagaccccgtagaaaagatcaaaggatcttcatcgatttgagatcctttttttctgcgcgtaatctgctgcttgcaaacaaaaaaaccaccgctaccagcggtggtttgtttgccggatcaagagctaccaactctttttccgaaggtaactggcttcagcagagcgcagataccaaatactgtccttctagtgtagccgtagttaggccaccacttcaagaactctgtagcaccgcctacatacctcgctctgctaatcctgttaccagtggctgctgccagtggcgataagtcgtgtcttaccgggttggactcaagacgatagttaccggataaggcgcagcggtcgggctgaacggggggttcgtgcacacagcccagcttggagcgaacgacctacaccgaactgagatacctacagcgtgagctatgagaaagcgccacgcttcccgaagggagaaaggcggacaggtatccggtaagcggcagggtcggaacaggagagcgcacgagggagcttccagggggaaacgcctggtatctttatagtcctgtcgggtttcgccacctctgacttgagcgtcgatttttgtgatgctcgtcaggggggcggagcctatggaaaatcgattccggaaacgccaggctcttccaacgcggcctttttacggttgaagagccctggccttttgctggccttttgct

SEQ ID NO: 248 - DNA, 165 bp, Artificial Sequence
  miR-16-2
ccggatcaacgccctaggtttatgtttggatgaactgacatacttgttccactctagcagcacgtaaatattggcgtagtgaaatatatattaaacaccaatattactgtgctgctttagtgtgacagggatacagcaactattttatcaattgtttgcgtcgac

SEQ ID NO: 249 - DNA, 165 bp, Artificial Sequence
  misc_feature (55)...(75): n may be any nucleotide
  misc_feature (97)...(117): n may be any nucleotide
  source (1)...(165): microRNA backbone where Ns represent inserted anti-sense and sense microRNAs
ccggatcaacgccctaggtttatgtttggatgaactgacatacgcgtatccgtcnnnnnnnnnnnnnnnnnnnnngtagtgaaatatatattaaacnnnnnnnnnnnnnnnnnnnnntacggtaacgcggaattcgcaactattttatcaattttttgcgtcgac

SEQ ID NO: 250 - DNA, 708 bp, Salmonella typhimurium
  endA
atgtaccgtaatttctcttttgccgctgtgttgctggccgcagcgttttcaggccaggccctggccgatggcattaacaatttttctcaggccaaagcggcgagcgtcaaagtcaatgctgacgcgcccggcagcttttactgcgggtgccaaatccgctggcagggtaaaaaaggcgtcgtagacctggagtcctgcggctataaggtgcgtaaaaacgagaatcgcgccagacgcattgagtgggagcacgttgtccccgcctggcaattcggtcatcagcgccagtgctggcaggacggcgggcgaaaaaactgcgctaaagacccggtctaccgcaaaatggaaagcgatatgcataacctgcaacccgcgattggcgaagtgaatggcgatcgcggcaactttatgtatagccagtggaacggcggcgaaggtcagtacgggcagtgcgccatgaaagtagatttcaaagcgaagctcgccgagccgcccgcccgcgcccgtggcgcaatcgcccgcacttatttttatatgcgcgaccaataccaactgaaactttcccgccaacaaacgcagctttttaacgtctgggataagcagtaccccgttaccgcctgggagtgcgagcgcgatgcgcgtatcgcgaaggtccagggtaatcataatccctatgtgcaacgcgcttgccaggcgcgaaagagctaa

SEQ ID NO: 251 - protein, 235 aa, Salmonella typhimurium
  endonuclease I (encoded by endA)
MYRNFSFAAALLAAAFSGQALADGINNFSQAKAASVKVNADAPGSFYCGCQIRWQGKKGVVDLESCGYKVRKNENRARRIEWEHVVPAWQFGHQRQCWQDGGRKNCAKDPVYRKMESDMHNLQPAIGEVNGDRGNFMYSQWNGGEGQYGQCAMKVDFKAKIAEPPARARGAIARIYFYMRDQYQLKLSRQQTQLFNVWDKQYPVTAWECERDARIAKVQGNHNPYVQRACQARKS

SEQ ID NO: 252 - DNA, 78 bp, Homo sapiens
  microRNA-103a1 (miR-103a1)
tactgccctcggcttctttacagtgctgccttgttgcatatggatcaagcagcattgtacagggctatgaaggcattg

SEQ ID NO: 253 - DNA, 71 bp, Homo sapiens
  microRNA-30a (miR-30a)
gcgactgtaaacatcctcgactggaagctgtgaagccacagatgggctttcagtcggatgtttgcagctgc

SEQ ID NO: 254 - DNA, 615 bp, Artificial Sequence
  pMB1 origin of replication
aaaggatcttcttgagatcctttttttctgcgcgtaatctgctgcttgcaaacaaaaaaaccaccgctaccagcggtggtttgtttgccggatcaagagctaccaactctttttccgaaggtaactggcttcagcagagcgcagataccaaatactgttcttctagtgtagccgtagttaggccaccacttcaagaactctgtagcaccgcctacatacctcgctctgctaatcctgttaccagtggctgctgccagtggcgataagtcgtgtcttaccgggttggactcaagacgatagttaccggataaggcgcagcggtcgggctgaacggggggttcgtgcacacagcccagcttggagcgaacgacctacaccgaactgagatacctacagcgtgagctatgagaaagcgccacgcttcccgaagggagaaaggcggacaggtatccggtaagcggcagggtcggaacaggagagcgcacgagggagcttccagggggaaacgcctggtatctttatagtcctgtcgggtttcgccacctctgacttgagcgtcgatttttgtgatgctcgtcaggggggcggagcctatggaaaaacgccagcaacgcg

SEQ ID NO: 255 - DNA, 913 bp, Artificial Sequence
  p15A origin of replication
gcgctagcggagtgtatactggcttactatgttggcactgatgagggtgtcagtgaagtgcttcatgtggcaggagaaaaaaggctgcaccggtgcgtcagcagaatatgtgatacaggatatattccgcttcctcgctcactgactcgctacgctcggtcgttcgactgcggcgagcggaaatggcttacgaacggggcggagatttcctggaagatgccaggaagatacttaacagggaagtgagagggccgcggcaaagccgtttttccataggctccgcccccctgacaagcatcacgaaatctgacgctcaaatcagtggtggcgaaacccgacaggactataaagataccaggcgtttccccctggcggctccctcgtgcgctctcctgttcctgcctttcggtttaccggtgtcattccgctgttatggccgcgtttgtctcattccacgcctgacactcagttccgggtaggcagttcgctccaagctggactgtatgcacgaaccccccgttcagtccgaccgctgcgccttatccggtaactatcgtcttgagtccaacccggaaagacatgcaaaagcaccactggcagcagccactggtaattgatttagaggagttagtcttgaagtcatgcgccggttaaggctaaactgaaaggacaagttttggtgactgcgctcctccaagccagttacctcggttcaaagagttggtagctcagagaaccttcgaaaaaccgccctgcaaggcggttttttcgttttcagagcaagagattacgcgcagaccaaaacgatctcaagaagatcatcttattaatcagataaaatatttctagatttcagtgcaatttatctcttcaaatgtagcacctgaagtcagccccatacgatataagttgt

SEQ ID NO: 256 - DNA, 223 bp, Artificial Sequence
  pSC101 origin of replication
gagttatacacagggctgggatctattctttttatctttttttattctttctttattctataaattataaccacttgaatataaacaaaaaaaacacacaaaggtctagcggaatttacagagggtctagcagaatttacaagttttccagcaaaggtctagcagaatttacagatacccacaactcaaaggaaaaggactagtaattatcattgactagccc

SEQ ID NO: 257 - DNA, 602 bp, E. coli
  ColE1 origin of replication
aggatcttcttgagatcctttttttctgcgcgtaatctgctgcttgcaaacaaaaaaaccaccgctaccaacggtggtttgtttgccggatcaagagctaccaactctttttccgaaggtaactggcttcagcagagcgcagataccaaatactgtccttctagtgtagccgtagtcgggccactacttcaagaactctgtagcaccgtttgtgccatcatcgctctgctaatccggttaccagtggctgctgccagtggcgttaaggcgtgccttaccgggttggactcaagacgatagttaccggataaggcgcagcggtcgggctgaacggggggttcgtgcacacagcccagcttggagcgaacgacctacaccgaactgagataccaacagcgtgagctatgagaaagcgccacgcttcccgaagggagaaaggcggacaggtatccggtaagcggcagggtcggaacaggagagcgcacgagggagcttccagggggaaacgcctggtatctttatagtcctgtcgggtttcgccacctctgacttgagcgtctatttttgtgatgctcgtcaggggggcggagcctatggaaaaa

SEQ ID NO: 258 - DNA, 201 bp, Pseudomonas syringae
  pPS10 origin of replication
acctgaccggcgcggaagcgctcttgatctttttttcttgtttttacttgttgttccttgttttcgtaattttaactatatgatttataagaaaaaaaagggtttaaaggggacagattcagggtttaaaggggacagattcagggtttaaaggggacagattcagggtttaaaggggacagattcaggctgatatccaca

SEQ ID NO: 259 - DNA, 617 bp, E. coli
  RK2 origin of replication
ccgggctggttgccctcgccgctgggctggcggccgtctatggccctgcaaacgcgccagaaacgccgtcgaagccgtgtgcgagacaccgcggccgccggcgttgtggataccacgcggaaaacttggccctcactgacagatgaggggcggacgttgacacttgaggggccgactcacccggcgcggcgttgacagatgaggggcaggctcgatttcggccggcgacgtggagctggccagcctcgcaaatcggcgaaaacgcctgattttacgcgagtttcccacagatgatgtggacaagcctggggataagtgccctgcggtattgacacttgaggggcgcgactactgacagatgaggggcgcgatccttgacacttgaggggcagagtgatgacagatgaggggcgcacctattgacatttgaggggctgtccacaggcagaaaatccagcatttgcaagggtttccgcccgtttttcggccaccgctaacctgtcttttaacctgcttttaaaccaatatttataaaccttgtttttaaccagggctgcgccctggcgcgtgaccgcgcacgccgaaggggggtgcccccccttctcgaaccctcccgg

SEQ ID NO: 260 - DNA, 639 bp, E. coli
  R6K alpha origin of replication
tcttacttctttgcgtagctgttaaatacagcgttgttttgataaaatcatcattatcatcgataatgctttcttcaatttttttatccttactctttaataaagcacttgctaataacttcataccttttgcaactgtcaaatttggttcatcagggtaaatgcttttaaggcatactaacaaataatcatggtcttcatcttcaactctaaactgaatttttttcatcataactcccaacaagaaccgactgtaggtcaccgggcaaacgctgaaaaataacgtcgaatgacgtcattttgcggcgtttgccctatcctgcatcgcagtagaaaatgccacaactgaaattgtgcttcagtatgtacagaaatgcaaaatctgagggatttcgtagctgaaagatcgccagtcttcgaccgtaaggataggagttgctgtaagacctgtgcggggcgttcgcttcgcgaacgggtctggcagggggcacaagcgctgtgctgtgatatatgcaaaagaagccacccacgaacgggagggcttcggcgaatcgactatagtgatctatttacccggctgattgtcgccttctagccctcgcgggcatcatgcaaccagtgcctgaatttagttatatg

SEQ ID NO: 261 - DNA, 1027 bp, E. coli
  R6K beta origin of replication
tgaagctttttttatgaatttatctgaagctgatgcagcttttctcaaggtatttgatgaaaccgtacctcccaaaaaagctaaggggtgatatatggctaaaatttacgatttccctcaaggagccgaacgccgcaggatgcaccgcaaaatccagtggaacaacgctgtaaaattatctaaaaatggctggagtaagccagaggttaaacgctggtcttttttagcattcatctcaactggctggtattactttcgcctttcggtagcagtcattttccatatcattactatttgtggtttagctgtgctcgcggcgttaagcaatacgatattctggattggtggcgcgatatgtcttgtaacctggtatacaaatgaccatcaaatttggagtactaacaatcttactatccctattgttttcggactttgggtgttaagtttagtagctgcaccactcatagattttttcagtcaaaaattgcccttttatcgtcttcttgtgcctgatgcgaagcgtgaggaagtgggcgaagatgattcttaaagccctgccctgtacggctttaacgccttctcgcggtagatctatggatgttgagaatgtagtatggttatactgcgatgcaggatagggcaaacgccgtaaaatgacgtctttgacgttatttttcagcgcttgcccggtgacctacagtcggtgcttgttgggagattttatgaagtttactagtaaaggattttatcagtgataaatatgcaaaggctattaacattttaaatgataaccttaaagaaaactactatgttttttatggtgtaaggttaagtgaaattctttttcctgcaagtgattatggtacagatgatttttttaaggagtttgaggaaataaacaacgttaccttgcctttagttgtttttgaaataaatgaacgtgaacctgtgattgtaattggttttgatgaaataaatcctgcgattcttatagagaaatccggtataaaggttttagtaatcggac

SEQ ID NO: 262 - DNA, 442 bp, E. coli
  R6K gamma origin of replication
gatcgctagtttgttttgactccatccattagggcttctaaaacgccttctaaggccatgtcagccgttaagtgttcctgtgtcactgaaaattgctttgagaggctctaagggcttctcagtgcgttacatccctggcttgttgtccacaaccgttaaaccttaaaagctttaaaagccttatatattcttttttttcttataaaacttaaaaccttagaggctatttaagttgctgatttatattaattttattgttcaaacatgagagcttagtacgtgaaacatgagagcttagtacgttagccatgagagcttagtacgttagccatgagggtttagttcgttaaacatgagagcttagtacgttaaacatgagagcttagtacgtgaaacatgagagcttagtacgtactatcaacaggttgaactgctgatcttc

SEQ ID NO: 263 - DNA, 242 bp, Enterobacteria phage P1
  P1 origin of plasmid replication oriR
tttcccgtcaacacacatcctatatcccgccagcacacattagcaacccgtcagcacacatttttatccctccagcacacatcgttttccctccagcacacatcgcgatacacttctaagccagacgtggcgcggcctgcaacgatcagggatctatatggatctaattgggatctgtatggacctgattattggatctatccagtggataatgtggataagtgaaaaaccggccaacgtag

SEQ ID NO: 264 - DNA, 792 bp, Artificial Sequence
  R1 origin of replication
ttatccacatttaactgcaagggacttccccataaggttacaaccgttcatgtcataaagcgccagccgccagtcttacagggtgcaatgtatcttttaaacacctgtttatatctcctttaaactacttaattacattcatttaaaaagaaaacctattcactgcctgtcctgtggacagacagatatgcacctcccaccgcaagcggcgggccccgaccggagccactttagttacaacacacaaaaacaacctccagaaaaaccccggtccagcgcagaaccgaaaccacaaagcccctccctcataactgaaaagcggccccgccccggcccaaagggccggaacagagtcgcttttaattatgaatgttgtaactacatcttcatcgctgtcagtcttctcgctggaagttctcagtacacgctcgtaagcggccctcacggcccgctaacgcggagatacgccccgacttcgggtaaaccctcgtcgggaccactccgaccgcgcacagaagctctctcatggctgaaagcgggtatggtctggcagggctggggatgggtaaggtgaaatctatcaatcagtaccggcttacgccgggcttcggcggttttactcctgtatcatatgaaacaacagagtgccgccttccatgccgctgatgcggcatatcctggtaacgatatctgaattgttatacatgtgtatatacgtggtaatgacaaaaataggacaagttaaaaatttacaggcgatgcaatgattcaaacacgtaatcaatatctgca

SEQ ID NO: 265 - DNA, 2920 bp, Artificial Sequence
  pWSK origin of replication
ccgatgcccttgagagccttcaacccagtcagctccttccggtgggcgcggggcatgactatcgtcgccgcacttatgactgtcttctttatcatgcaactcgtaggacagggtgccggcagcgctctgggtcattttcggcgaggaccgctttcgctggagcgcgacgatgatcggcctgtcgcttgcggtattcggaatcttgcacgccctcgctcaagccttcgtcactggtcccgccaccaaacgtttcggcgagaagcaggccattatcgccggcatggcggccgacgcgctgggctacgtcttgctggcgttcgcgacgcgaggctggatggccttccccattatgattcttctcgcttccggcggcatcgggatgcccgcgttgcaggccatgctgtccaggcaggtagatgacgaccatcagggacagcttcaaggatcgctcgcggctcttaccagcctaacttcgatcattggaccgctgatcgtcacggcgatttatgccgcctcggcgagcacatggaacgggttggcatggattgtaggcgccgccctataccttgtctgcctccccgcgttgcgtcgcggtgcatggagccgggccacctcgacctgaatggaagccggcggcacctcgctaacggattcaccactccgcagacccgccataaaacgccctgagaagcccgtgacgggcttttcttgtattatgggtagtttccttgcatgaatccataaaaggcgcctgtagtgccatttacccccattcactgccagagccgtgagcgcagcgaactgaatgtcacgaaaaagacagcgactcaggtgcctgatggtcggagacaaaaggaatattcagcgatttgcccgagcttgcgagggtgctacttaagcctttagggttttaaggtctgttttgtagaggagcaaacagcgtttgcgacatccttttgtaatactgcggaactgactaaagtagtgagttatacacagggctgggatctattctttttatctttttttattctttctttattctataaattataaccacttgaatataaacaaaaaaaacacacaaaggtctagcggaatttacagagggtctagcagaatttacaagttttccagcaaaggtctagcagaatttacagatacccacaactcaaaggaaaaggactagtaattatcattgactagcccatctcaattggtatagtgattaaaatcacctagaccaattgagatgtatgtctgaattagttgttttcaaagcaaatgaactagcgattagtcgctatgacttaacggagcatgaaaccaagctaattttatgctgtgtggcactactcaaccccacgattgaaaaccctacaaggaaagaacggacggtatcgttcacttataaccaatacgctcagatgatgaacatcagtagggaaaatgcttatggtgtattagctaaagcaaccagagagctgatgacgagaactgtggaaatcaggaatcctttggttaaaggctttgagattttccagtggacaaactatgccaagttctcaagcgaaaaattagaattagtttttagtgaagagatattgccttatcttttccagttaaaaaaattcataaaatataatctggaacatgttaagtcttttgaaaacaaatactctatgaggatttatgagtggttattaaaagaactaacacaaaagaaaactcacaaggcaaatatagagattagccttgatgaatttaagttcatgttaatgcttgaaaataactaccatgagtttaaaaggcttaaccaatgggttttgaaaccaataagtaaagatttaaacacttacagcaatatgaaattggtggttgataagcgaggccgcccgactgatacgttgattttccaagttgaactagatagacaaatggatctcgtaaccgaacttgagaacaaccagataaaaatgaatggtgacaaaataccaacaaccattacatcagattcctacctacataacggactaagaaaaacactacacgatgctttaactgcaaaaattcagctcaccagttttgaggcaaaatttttgagtgacatgcaaagtaagtatgatctcaatggttcgttctcatggctcacgcaaaaacaacgaaccacactagagaacatactggctaaatacggaaggatctgaggttcttatggctcttgtatctatcagtgaagcatcaagactaacaaacaaaagtagaacaactgttcaccgttacatatcaaagggaaaactgtccatatgcacagatgaaaacggtgtaaaaaagatagatacatcagagcttttacgagtttttggtgcattcaaagctgttcaccatgaacagatcgacaatgtaacagatgaacagcatgtaacacctaatagaacaggtgaaaccagtaaaacaaagcaactagaacatgaaattgaacacctgagacaacttgttacagctcaacagtcacacatagacagcctgaaacaggcgatgctgcttatcgaatcaaagctgccgacaacacgggagccagtgacgcctcccgtggggaaaaaatcatggcaattctggaagaaatagcgctttcagccggcaaaccggctgaagccggatctgcgattctgataacaaactagcaacaccagaacagcccgtttgcgggcagcaaaacccgtacttttggacgttccggcggttttttgtggcgagtggtgttcgggcggtgcgcgcaagatccattatgttaaacgggcgagtttacatctcaaaaccgcccgcttaacaccatcagaaatcctcagcgcgattttaagcaccaacccccccccgtaacacccaaatccatactgaaagtggctttgttgaataaatc

SEQ ID NO: 266 - DNA, 37 bp, E. coli
  ColE2 origin of replication
aaaatgagaccagataagccttatcagataacagcgc

SEQ ID NO: 267 - DNA, 668 bp, Artificial Sequence
  pUC origin of replication
tgagcaaaaggccagcaaaaggccaggaaccgtaaaaaggccgcgttgctggcgtttttccataggctccgcccccctgacgagcatcacaaaaatcgacgctcaagtcagaggtggcgaaacccgacaggactataaagataccaggcgtttccccctggaagctccctcgtgcgctctcctgttccgaccctgccgcttaccggatacctgtccgcctttctcccttcgggaagcgtggcgctttctcatagctcacgctgtaggtatctcagttcggtgtaggtcgttcgctccaagctgggctgtgtgcacgaaccccccgttcagcccgaccgctgcgccttatccggtaactatcgtcttgagtccaacccggtaagacacgacttatcgccactggcagcagccactggtaacaggattagcagagcgaggtatgtaggcggtgctacagagttcttgaagtggtggcctaactacggctacactagaagaacagtatttggtatctgcgctctgctgaagccagttaccttcggaaaaagagttggtagctcttgatccggcaaacaaaccaccgctggtagcggtggtttttttgtttgcaagcagcagattacgcgcagaaaaaaaggatctcaagaagatcctttgatcttttctac

SEQ ID NO: 268 - DNA, 457 bp, Bacteriophage F1
  F1 origin of replication
gacgcgccctgtagcggcgcattaagcgcggcgggtgtggtggttacgcgcagcgtgaccgctacacttgccagcgccctagcgcccgctcctttcgctttcttcccttcctttctcgccacgttcgccggctttccccgtcaagctctaaatcgggggctccctttagggttccgatttagtgctttacggcacctcgaccccaaaaaacttgattagggtgatggttcacgtagtgggccatcgccctgatagacggtttttcgccctttgacgttggagtccacgttctttaatagtggactcttgttccaaactggaacaacactcaaccctatctcggtctattcttttgatttataagggattttgccgatttcggcctattggttaaaaaatgagctgatttaacaaaaatttaacgcgaattttaacaaaatattaacgcttacaattt

SEQ ID NO: 269 - DNA, 534 bp, Homo sapiens
  IL-7
atgttccatgtttcttttaggtatatctttggacttcctcccctgatccttgttctgttgccagtagcatcatctgattgtgatattgaaggtaaagatggcaaacaatatgagagtgttctaatggtcagcatcgatcaattattggacagcatgaaagaaattggtagcaattgcctgaataatgaatttaacttttttaaaagacatatctgtgatgctaataaggaaggtatgtttttattccgtgctgctcgcaagttgaggcaatttcttaaaatgaatagcactggtgattttgatctccacttattaaaagtttcagaaggcacaacaatactgttgaactgcactggccaggttaaaggaagaaaaccagctgccctgggtgaagcccaaccaacaaagagtttggaagaaaataaatctttaaaggaacagaaaaaactgaatgacttgtgtttcctaaagagactattacaagagataaaaacttgttggaataaaattttgatgggcactaaagaacactga

SEQ ID NO: 270 - DNA, 987 bp, Homo sapiens
  IL12B
atgtgtcaccagcagttggtcatctcttggttttccctggtttttctggcatctcccctcgtggccatatgggaactgaagaaagatgtttatgtcgtagaattggattggtatccggatgcccctggagaaatggtggtcctcacctgtgacacccctgaagaagatggtatcacctggaccttggaccagagcagtgaggtcttaggctctggcaaaaccctgaccatccaagtcaaagagtttggagatgctggccagtacacctgtcacaaaggaggcgaggttctaagccattcgctcctgctgcttcacaaaaaggaagatggaatttggtccactgatattttaaaggaccagaaagaacccaaaaataagacctttctaagatgcgaggccaagaattattctggacgtttcacctgctggtggctgacgacaatcagtactgatttgacattcagtgtcaaaagcagcagaggctcttctgacccccaaggggtgacgtgcggagctgctacactctctgcagagagagtcagaggggacaacaaggagtatgagtactcagtggagtgccaggaggacagtgcctgcccagctgctgaggagagtctgcccattgaggtcatggtggatgccgttcacaagctcaagtatgaaaactacaccagcagcttcttcatcagggacatcatcaaacctgacccacccaagaacttgcagctgaagccattaaagaattctcggcaggtggaggtcagctgggagtaccctgacacctggagtactccacattcctacttctccctgacattctgcgttcaggtccagggcaagagcaagagagaaaagaaagatagagtcttcacggacaagacctcagccacggtcatctgccgcaaaaatgccagcattagcgtgcgggcccaggaccgctactatagctcatcttggagcgaatgggcatctgtgccctgcagttag

SEQ ID NO: 271 - DNA, 762 bp, Homo sapiens
  IL12A
atgtggccccctgggtcagcctcccagccaccgccctcacctgccgcggccacaggtctgcatccagcggctcgccctgtgtccctgcagtgccggctcagcatgtgtccagcgcgcagcctcctccttgtggctaccctggtcctcctggaccacctcagtttggccagaaacctccccgtggccactccagacccaggaatgttcccatgccttcaccactcccaaaacctgctgagggccgtcagcaacatgctccagaaggccagacaaactctagaattttacccttgcacttctgaagagattgatcatgaagatatcacaaaagataaaaccagcacagtggaggcctgtttaccattggaattaaccaagaatgagagttgcctaaattccagagagacctctttcataactaatgggagttgcctggcctccagaaagacctcttttatgatggccctgtgccttagtagtatttatgaagacttgaagatgtaccaggtggagttcaagaccatgaatgcaaagcttctgatggatcctaagaggcagatctttctagatcaaaacatgctggcagttattgatgagctgatgcaggccctgaatttcaacagtgagactgtgccacaaaaatcctcccttgaagaaccggatttttataaaactaaaatcaagctctgcatacttcttcatgctttcagaattcgggcagtgactattgatagagtgatgagctatctgaatgcttcctaa

SEQ ID NO: 272 - DNA, 489 bp, Homo sapiens
  IL-15
atgagaatttcgaaaccacatttgagaagtatttccatccagtgctacttgtgtttacttctaaacagtcattttctaactgaagctggcattcatgtcttcattttgggctgtttcagtgcagggcttcctaaaacagaagccaactgggtgaatgtaataagtgatttgaaaaaaattgaagatcttattcaatctatgcatattgatgctactttatatacggaaagtgatgttcaccccagttgcaaagtaacagcaatgaagtgctttctcttggagttacaagttatttcacttgagtccggagatgcaagtattcatgatacagtagaaaatctgatcatcctagcaaacaacagtttgtcttctaatgggaatgtaacagaatctggatgcaaagaatgtgaggaactggaggaaaaaaatattaaagaatttttgcagagttttgtacatattgtccaaatgttcatcaacacttcttga

SEQ ID NO: 273 - DNA, 804 bp, Homo sapiens
  IL15RA
atggccccgcggcgggcgcgcggctgccggaccctcggtctcccggcgctgctactgctgctgctgctccggccgccggcgacgcggggcatcacgtgccctccccccatgtccgtggaacacgcagacatctgggtcaagagctacagcttgtactccagggagcggtacatttgtaactctggtttcaagcgtaaagccggcacgtccagcctgacggagtgcgtgttgaacaaggccacgaatgtcgcccactggacaacccccagtctcaaatgcattagagaccctgccctggttcaccaaaggccagcgccaccctccacagtaacgacggcaggggtgaccccacagccagagagcctctccccttctggaaaagagcccgcagcttcatctcccagctcaaacaacacagcggccacaacagcagctattgtcccgggctcccagctgatgccttcaaaatcaccttccacaggaaccacagagataagcagtcatgagtcctcccacggcaccccctctcagacaacagccaagaactgggaactcacagcatccgcctcccaccagccgccaggtgtgtatccacagggccacagcgacaccactgtggctatctccacgtccactgtcctgctgtgtgggctgagcgctgtgtctctcctggcatgctacctcaagtcaaggcaaactcccccgctggccagcgttgaaatggaagccatggaggctctgccggtgacttgggggaccagcagcagagatgaagacttggaaaactgctctcaccacctatga

SEQ ID NO: 274 - DNA, 378 bp, Homo sapiens
  CXCL9
atgaagaaaagtggtgttcttttcctcttgggcatcatcttgctggttctgattggagtgcaaggaaccccagtagtgagaaagggtcgctgttcctgcatcagcaccaaccaagggactatccacctacaatccttgaaagaccttaaacaatttgccccaagcccttcctgcgagaaaattgaaatcattgctacactgaagaatggagttcaaacatgtctaaacccagattcagcagatgtgaaggaactgattaaaaagtgggagaaacaggtcagccaaaagaaaaagcaaaagaatgggaaaaaacatcaaaaaaagaaagttctgaaagttcgaaaatctcaacgttctcgtcaaaagaagactacataa

SEQ ID NO: 275 - DNA, 297 bp, Homo sapiens
  CXCL10
atgaatcaaactgccattctgatttgctgccttatctttctgactctaagtggcattcaaggagtacctctctctagaactgtacgctgtacctgcatcagcattagtaatcaacctgttaatccaaggtctttagaaaaacttgaaattattcctgcaagccaattttgtccacgtgttgagatcattgctacaatgaaaaagaagggtgagaagagatgtctgaatccagaatcgaaggccatcaagaatttactgaaagcagttagcaaggaaaggtctaaaagatctccttaa

SEQ ID NO: 276 - DNA, 285 bp, Homo sapiens
  CXCL11
atgagtgtgaagggcatggctatagccttggctgtgatattgtgtgctacagttgttcaaggcttccccatgttcaaaagaggacgctgtctttgcataggccctggggtaaaagcagtgaaagtggcagatattgagaaagcctccataatgtacccaagtaacaactgtgacaaaatagaagtgattattaccctgaaagaaaataaaggacaacgatgcctaaatcccaaatcgaagcaagcaaggcttataatcaaaaaagttgaaagaaagaatttttaa

SEQ ID NO: 277 - DNA, 465 bp, Homo sapiens
  CCL5
atgaaggtctccgcggcagccctcgctgtcatcctcattgctactgccctctgcgctcctgcatctgcctccccatattcctcggacaccacaccctgctgctttgcctacattgcccgcccactgccccgtgcccacatcaaggagtatttctacaccagtggcaagtgctccaacccagcagtcgtccacaggtcaaggatgccaaagagagagggacagcaagtctggcaggatttcctgtatgactcccggctgaacaagggcaagctttgtcacccgaaagaaccgccaagtgtgtgccaacccagagaagaaatgggttcgggagtacatcaactctttggagatgagctaggatggagagtccttgaacctgaacttacacaaatttgcctgtttctgcttgctcttgtcctagcttgggaggcttcccctcactatcctaccccacccgctccttga

SEQ ID NO: 278 - DNA, 765 bp, Homo sapiens
  4-1BB Ligand
atggaatacgcctctgacgcttcactggaccccgaagccccgtggcctcccgcgccccgcgctcgcgcctgccgcgtactgccttgggccctggtcgcggggctgctgctgctgctgctgctcgctgccgcctgcgccgtcttcctcgcctgcccctgggccgtgtccggggctcgcgcctcgcccggctccgcggccagcccgagactccgcgagggtcccgagctttcgcccgacgatcccgccggcctcttggacctgcggcagggcatgtttgcgcagctggtggcccaaaatgttctgctgatcgatgggcccctgagctggtacagtgacccaggcctggcaggcgtgtccctgacggggggcctgagctacaaagaggacacgaaggagctggtggtggccaaggctggagtctactatgtcttctttcaactagagctgcggcgcgtggtggccggcgagggctcaggctccgtttcacttgcgctgcacctgcagccactgcgctctgctgctggggccgccgccctggctttgaccgtggacctgccacccgcctcctccgaggctcggaactcggccttcggtttccagggccgcttgctgcacctgagtgccggccagcgcctgggcgtccatcttcacactgaggccagggcacgccatgcctggcagcttacccagggcgccacagtcttgggactcttccgggtgacccccgaaatcccagccggactcccttcaccgaggtcggaataa

SEQ ID NO: 279 - DNA, 1368 bp, Homo sapiens
  TNFRSF1A
atgggcctctccaccgtgcctgacctgctgctgccactggtgctcctggagctgttggtgggaatatacccctcaggggttattggactggtccctcacctaggggacagggagaagagagatagtgtgtgtccccaaggaaaatatatccaccctcaaaataattcgatttgctgtaccaagtgccacaaaggaacctacttgtacaatgactgtccaggcccggggcaggatacggactgcagggagtgtgagagcggctccttcaccgcttcagaaaaccacctcagacactgcctcagctgctccaaatgccgaaaggaaatgggtcaggtggagatctcttcttgcacagtggaccgggacaccgtgtgtggctgcaggaagaaccagtaccggcattattggagtgaaaaccttttccagtgcttcaattgcagcctctgcctcaatgggaccgtgcacctctcctgccaggagaaacagaacaccgtgtgcacctgccatgcaggtttctttctaagagaaaacgagtgtgtctcctgtagtaactgtaagaaaagcctggagtgcacgaagttgtgcctaccccagattgagaatgttaagggcactgaggactcaggcaccacagtgctgttgcccctggtcattttctttggtctttgccttttatccctcctcttcattggtttaatgtatcgctaccaacggtggaagtccaagctctactccattgtttgtgggaaatcgacacctgaaaaagagggggagcttgaaggaactactactaagcccctggccccaaacccaagcttcagtcccactccaggcttcacccccaccctgggcttcagtcccgtgcccagttccaccttcacctccagctccacctatacccccggtgactgtcccaactttgcggctccccgcagagaggtggcaccaccctatcagggggctgaccccatccttgcgacagccctcgcctccgaccccatccccaacccccttcagaagtgggaggacagcgcccacaagccacagagcctagacactgatgaccccgcgacgctgtacgccgtggtggagaacgtgcccccgttgcgctggaaggaattcgtgcggcgcctagggctgagcgaccacgagatcgatcggctggagctgcagaacgggcgctgcctgcgcgaggcgcaatacagcatgctggcgacctggaggcggcgcacgccgcggcgcgaggccacgctggagctgctgggacgcgtgctccgcgacatggacctgctgggctgcctggaggacatcgaggaggcgctttgcggccccgccgccctcccgcccgcgcccagtcttctcagatga

SEQ ID NO: 280 - DNA, 1386 bp, Homo sapiens
  TNFRSF1B
atggcgcccgtcgccgtctgggccgcgctggccgtcggactggagctctgggctgcggcgcacgccttgcccgcccaggtggcatttacaccctacgccccggagcccgggagcacatgccggctcagagaatactatgaccagacagctcagatgtgctgcagcaaatgctcgccgggccaacatgcaaaagtcttctgtaccaagacctcggacaccgtgtgtgactcctgtgaggacagcacatacacccagctctggaactgggttcccgagtgcttgagctgtggctcccgctgtagctctgaccaggtggaaactcaagcctgcactcgggaacagaaccgcatctgcacctgcaggcccggctggtactgcgcgctgagcaagcaggaggggtgccggctgtgcgcgccgctgcgcaagtgccgcccgggcttcggcgtggccagaccaggaactgaaacatcagacgtggtgtgcaagccctgtgccccggggacgttctccaacacgacttcatccacggatatttgcaggccccaccagatctgtaacgtggtggccatccctgggaatgcaagcatggatgcagtctgcacgtccacgtcccccacccggagtatggccccaggggcagtacacttaccccagccagtgtccacacgatcccaacacacgcagccaactccagaacccagcactgctccaagcacctccttcctgctcccaatgggccccagccccccagctgaagggagcactggcgacttcgctcttccagttggactgattgtgggtgtgacagccttgggtctactaataataggagtggtgaactgtgtcatcatgacccaggtgaaaaagaagcccttgtgcctgcagagagaagccaaggtgcctcacttgcctgccgataaggcccggggtacacagggccccgagcagcagcacctgctgatcacagcgccgagctccagcagcagctccctggagagctcggccagtgcgttggacagaagggcgcccactcggaaccagccacaggcaccaggcgtggaggccagtggggccggggaggcccgggccagcaccgggagctcagattcttcccctggtggccatgggacccaggtcaatgtcacctgcatcgtgaacgtctgtagcagctctgaccacagctcacagtgctcctcccaagccagctccacaatgggagacacagattccagcccctcggagtccccgaaggacgagcaggtccccttctccaaggaggaatgtgcctttcggtcacagctggagacgccagagaccctgctggggagcaccgaagagaagcccctgccccttggagtgcctgatgctgggatgaagcccagttaa

SEQ ID NO: 281 - DNA, 1308 bp, Homo sapiens
  LTBR
atgctcctgccttgggccacctctgcccccggcctggcctgggggcctctggtgctgggcctcttcgggctcctggcagcatcgcagccccaggcggtgcctccatatgcgtcggagaaccagacctgcagggaccaggaaaaggaatactatgagccccagcaccgcatctgctgctcccgctgcccgccaggcacctatgtctcagctaaatgtagccgcatccgggacacagtttgtgccacatgtgccgagaattcctacaacgagcactggaactacctgaccatctgccagctgtgccgcccctgtgacccagtgatgggcctcgaggagattgccccctgcacaagcaaacggaagacccagtgccgctgccagccgggaatgttctgtgctgcctgggccctcgagtgtacacactgcgagctactttctgactgcccgcctggcactgaagccgagctcaaagatgaagttgggaagggtaacaaccactgcgtcccctgcaaggccgggcacttccagaatacctcctcccccagcgcccgctgccagccccacaccaggtgtgagaaccaaggtctggtggaggcagctccaggcactgcccagtccgacacaacctgcaaaaatccattagagccactgcccccagagatgtcaggaaccatgctgatgctggccgttctgctgccactggccttctttctgctccttgccaccgtcttctcctgcatctggaagagccacccttctctctgcaggaaactgggatcgctgctcaagaggcgtccgcagggagagggacccaatcctgtagctggaagctgggagcctccgaaggcccatccatacttccctgacttggtacagccactgctacccatttctggagatgtttccccagtatccactgggctccccgcagccccagttttggaggcaggggtgccgcaacagcagagtcctctggacctgaccagggagccgcagttggaacccggggagcagagccaggtggcccacggtaccaatggcattcatgtcaccggcgggtctatgactatcactggcaacatctacatctacaatggaccagtactggggggaccaccgggtcctggagacctcccagctacccccgaacctccataccccattcccgaagagggggaccctggccctcccgggctctctacaccccaccaggaagatggcaaggcttggcacctagcggagacagagcactgtggtgccacaccctctaacaggggcccaaggaaccaatttatcacccatgactga

SEQ ID NO: 282 - DNA, 1008 bp, Homo sapiens
  FAS
atgctgggcatctggaccctcctacctctggttcttacgtctgttgctagattatcgtccaaaagtgttaatgcccaagtgactgacatcaactccaagggattggaattgaggaagactgttactacagttgagactcagaacttggaaggcctgcatcatgatggccaattctgccataagccctgtcctccaggtgaaaggaaagctagggactgcacagtcaatggggatgaaccagactgcgtgccctgccaagaagggaaggagtacacagacaaagcccatttttcttccaaatgcagaagatgtagattgtgtgatgaaggacatggcttagaagtggaaataaactgcacccggacccagaataccaagtgcagatgtaaaccaaactttttttgtaactctactgtatgtgaacactgtgacccttgcaccaaatgtgaacatggaatcatcaaggaatgcacactcaccagcaacaccaagtgcaaagaggaaggatccagatctaacttggggtggctttgtcttcttcttttgccaattccactaattgtttgggtgaagagaaaggaagtacagaaaacatgcagaaagcacagaaaggaaaaccaaggttctcatgaatctccaactttaaatcctgaaacagtggcaataaatttatctgatgttgacttgagtaaatatatcaccactattgctggagtcatgacactaagtcaagttaaaggctttgttcgaaagaatggtgtcaatgaagccaaaatagatgagatcaagaatgacaatgtccaagacacagcagaacagaaagttcaactgcttcgtaattggcatcaacttcatggaaagaaagaagcgtatgacacattgattaaagatctcaaaaaagccaatctttgtactcttgcagagaaaattcagactatcatcctcaaggacattactagtgactcagaaaattcaaacttcagaaatgaaatccaaagcttggtctag

SEQ ID NO: 283 - DNA, 903 bp, Homo sapiens
  TNFRSF6B
atgagggcgctggaggggccaggcctgtcgctgctgtgcctggtgttggcgctgcctgccctgctgccggtgccggctgtacgcggagtggcagaaacacccacctacccctggcgggacgcagagacaggggagcggctggtgtgcgcccagtgccccccaggcacctttgtgcagcggccgtgccgccgagacagccccacgacgtgtggcccgtgtccaccgcgccactacacgcagttctggaactacctagagcgctgccgctactgcaacgtcctctgcggggagcgtgaggaggaggcacgggcttgccacgccacccacaaccgtgcctgccgctgccgcaccggcttcttcgcgcacgctggtttctgcttggagcacgcatcgtgtccacctggtgccggcgtgattgccccgggcacccccagccagaacacgcagtgccagccgtgccccccaggcaccttctcagccagcagctccagctcagagcagtgccagccccaccgcaactgcacggccctgggcctggccctcaatgtgccaggctcttcctcccatgacaccctgtgcaccagctgcactggcttccccctcagcaccagggtaccaggagctgaggagtgtgagcgtgccgtcatcgactttgtggctttccaggacatctccatcaagaggctgcagcggctgctgcaggccctcgaggccccggagggctggggtccgacaccaagggcgggccgcgcggccttgcagctgaagctgcgtcggcggctcacggagctcctgggggcgcaggacggggcgctgctggtgcggctgctgcaggcgctgcgcgtggccaggatgcccgggctggagcggagcgtccgtgagcgcttcctccctgtgcactga

SEQ ID NO: 284 - DNA, 783 bp, Homo sapiens
  CD27
atggcacggccacatccctggtggctgtgcgttctggggaccctggtggggctctcagctactccagcccccaagagctgcccagagaggcactactgggctcagggaaagctgtgctgccagatgtgtgagccaggaacattcctcgtgaaggactgtgaccagcatagaaaggctgctcagtgtgatccttgcataccgggggtctccttctctcctgaccaccacacccggccccactgtgagagctgtcggcactgtaactctggtcttctcgttcgcaactgcaccatcactgccaatgctgagtgtgcctgtcgcaatggctggcagtgcagggacaaggagtgcaccgagtgtgatcctcttccaaacccttcgctgaccgctcggtcgtctcaggccctgagcccacaccctcagcccacccacttaccttatgtcagtgagatgctggaggccaggacagctgggcacatgcagactctggctgacttcaggcagctgcctgcccggactctctctacccactggccaccccaaagatccctgtgcagctccgattttattcgcatccttgtgatcttctctggaatgttccttgttttcaccctggccggggccctgttcctccatcaacgaaggaaatatagatcaaacaaaggagaaagtcctgtggagcctgcagagccttgtcgttacagctgccccagggaggaggagggcagcaccatccccatccaggaggattaccgaaaaccggagcctgcctgctccccctga

SEQ ID NO: 285 - DNA, 1788 bp, Homo sapiens
  TNFRSF8
atgcgcgtcctcctcgccgcgctgggactgctgttcctgggggcgctacgagccttcccacaggatcgacccttcgaggacacctgtcatggaaaccccagccactactatgacaaggctgtcaggaggtgctgttaccgctgccccatggggctgttcccgacacagcagtgcccacagaggcctactgactgcaggaagcagtgtgagcctgactactacctggatgaggccgaccgctgtacagcctgcgtgacttgttctcgagacgacctcgtggagaagacgccgtgtgcatggaactcctcccgtgtctgcgaatgtcgacccggcatgttctgttccacgtctgccgtcaactcctgtgcccgctgcttcttccattctgtctgtccggcagggatgattgtcaagttcccaggcacggcgcagaagaacacggtctgtgagccggcttccccaggggtcagccctgcctgtgccagcccagagaactgcaaggaaccctccagtggcaccatcccccaggccaagcccaccccggtgtccccagcaacctccagtgccagcaccatgcctgtaagagggggcacccgcctcgcccaggaagctgcttctaaactgacgagggctcccgactctccctcctctgtgggaaggcctagttcagatccaggtctgtccccaacacagccatgcccagaggggtctggtgattgcagaaagcagtgtgagcccgactactacctggacgaggccggccgctgcacggcctgcgtgagctgttctcgagatgaccttgtggagaagacgccatgtgcatggaactcctcccgcacctgcgaatgtcgacctggcatgatctgtgccacatcagccaccaactcctgtgcccgctgtgtcccctacccaatctgtgcagcagagacggtcaccaagccccaggatatggctgagaaggacaccacctttgaggcgccacccctggggacccagccggactgcaaccccaccccagagaatggcgaggcgcctgccagcaccagccccactcagagcttgctggtggactcccaggccagtaagacgctgcccatcccaaccagcgctcccgtcgctctctcctccacggggaagcccgttctggatgcagggccagtgctcttctgggtgatcctggtgttggttgtggtggtcggctccagcgccttcctcctgtgccaccggagggcctgcaggaagcgaattcggcagaagctccacctgtgctacccggtccagacctcccagcccaagctagagcttgtggattccagacccaggaggagctcaacgcagctgaggagtggtgcgtcggtgacagaacccgtcgcggaagagcgagggttaatgagccagccactgatggagacctgccacagcgtgggggcagcctacctggagagcctgccgctgcaggatgccagcccggccgggggcccctcgtcccccagggaccttcctgagccccgggtgtccacggagcacaccaataacaagattgagaaaatctacatcatgaaggctgacaccgtgatcgtggggaccgtgaaggctgagctgccggagggccggggcctggcggggccagcagagcccgagttggaggaggagctggaggcggaccataccccccactaccccgagcaggagacagaaccgcctctgggcagctgcagcgatgtcatgctctcagtggaagaggaagggaaagaagaccccttgcccacagctgcctctggaaagtga

SEQ ID NO: 286 - DNA, 1407 bp, Homo sapiens
  TNFRSF10A
atggcgccaccaccagctagagtacatctaggtgcgttcctggcagtgactccgaatcccgggagcgcagcgagtgggacagaggcagccgcggccacacccagcaaagtgtggggctcttccgcggggaggattgaaccacgaggcgggggccgaggagcgctccctacctccatgggacagcacggacccagtgcccgggcccgggcagggcgcgccccaggacccaggccggcgcgggaagccagccctcggctccgggtccacaagaccttcaagtttgtcgtcgtcggggtcctgctgcaggtcgtacctagctcagctgcaaccatcaaacttcatgatcaatcaattggcacacagcaatgggaacatagccctttgggagagttgtgtccaccaggatctcatagatcagaacatcctggagcctgtaaccggtgcacagagggtgtgggttacaccaatgcttccaacaatttgtttgcttgcctcccatgtacagcttgtaaatcagatgaagaagagagaagtccctgcaccacgaccaggaacacagcatgtcagtgcaaaccaggaactttccggaatgacaattctgctgagatgtgccggaagtgcagcagagggtgccccagagggatggtcaaggtcaaggattgtacgccctggagtgacatcgagtgtgtccacaaagaatcaggcaatggacataatatatgggtgattttggttgtgactttggttgttccgttgctgttggtggctgtgctgattgtctgttgttgcatcggctcaggttgtggaggggaccccaagtgcatggacagggtgtgtttctggcgcttgggtctcctacgagggcctggggctgaggacaatgctcacaacgagattctgagcaacgcagactcgctgtccactttcgtctctgagcagcaaatggaaagccaggagccggcagatttgacaggtgtcactgtacagtccccaggggaggcacagtgtctgctgggaccggcagaagctgaagggtctcagaggaggaggctgctggttccagcaaatggtgctgaccccactgagactctgatgctgttctttgacaagtttgcaaacatcgtgccctttgactcctgggaccagctcatgaggcagctggacctcacgaaaaatgagatcgatgtggtcagagctggtacagcaggcccaggggatgccttgtatgcaatgctgatgaaatgggtcaacaaaactggacggaacgcctcgatccacaccctgctggatgccttggagaggatggaagagagacatgcaagagagaagattcaggacctcttggtggactctggaaagttcatctacttagaagatggcacaggctctgccgtgtccttggagtga

SEQ ID NO: 287 - DNA, 1323 bp, Homo sapiens
  TNFRSF10B
atggaacaacggggacagaacgccccggccgcttcgggggcccggaaaaggcacggcccaggacccagggaggcgcggggagccaggcctgggccccgggtccccaagacccttgtgctcgttgtcgccgcggtcctgctgttggtctcagctgagtctgctctgatcacccaacaagacctagctccccagcagagagcggccccacaacaaaagaggtccagcccctcagagggattgtgtccacctggacaccatatctcagaagacggtagagattgcatctcctgcaaatatggacaggactatagcactcactggaatgacctccttttctgcttgcgctgcaccaggtgtgattcaggtgaagtggagctaagtccctgcaccacgaccagaaacacagtgtgtcagtgcgaagaaggcaccttccgggaagaagattctcctgagatgtgccggaagtgccgcacagggtgtcccagagggatggtcaaggtcggtgattgtacaccctggagtgacatcgaatgtgtccacaaagaatcaggtacaaagcacagtggggaagtcccagctgtggaggagacggtgacctccagcccagggactcctgcctctccctgttctctctcaggcatcatcataggagtcacagttgcagccgtagtcttgattgtggctgtgtttgtttgcaagtctttactgtggaagaaagtccttccttacctgaaaggcatctgctcaggtggtggtggggaccctgagcgtgtggacagaagctcacaacgacctggggctgaggacaatgtcctcaatgagatcgtgagtatcttgcagcccacccaggtccctgagcaggaaatggaagtccaggagccagcagagccaacaggtgtcaacatgttgtcccccggggagtcagagcatctgctggaaccggcagaagctgaaaggtctcagaggaggaggctgctggttccagcaaatgaaggtgatcccactgagactctgagacagtgcttcgatgactttgcagacttggtgccctttgactcctgggagccgctcatgaggaagttgggcctcatggacaatgagataaaggtggctaaagctgaggcagcgggccacagggacaccttgtacacgatgctgataaagtgggtcaacaaaaccgggcgagatgcctctgtccacaccctgctggatgccttggagacgctgggagagagacttgccaagcagaagattgaggaccacttgttgagctctggaaagttcatgtatctagaaggtaatgcagactctgccatgtcctaa

SEQ ID NO: 288 - DNA, 780 bp, Homo sapiens
  TNFRSF10C
atggcccggatccccaagaccctaaagttcgtcgtcgtcatcgtcgcggtcctgctgccagtcctagcttactctgccaccactgcccggcaggaggaagttccccagcagacagtggccccacagcaacagaggcacagcttcaagggggaggagtgtccagcaggatctcatagatcagaacatactggagcctgtaacccgtgcacagagggtgtggattacaccaacgcttccaacaatgaaccttcttgcttcccatgtacagtttgtaaatcagatcaaaaacataaaagttcctgcaccatgaccagagacacagtgtgtcagtgtaaagaaggcaccttccggaatgaaaactccccagagatgtgccggaagtgtagcaggtgccctagtggggaagtccaagtcagtaattgtacgtcctgggatgatatccagtgtgttgaagaatttggtgccaatgccactgtggaaaccccagctgctgaagagacaatgaacaccagcccggggactcctgccccagctgctgaagagacaatgaacaccagcccagggactcctgccccagctgctgaagagacaatgaccaccagcccggggactcctgccccagctgctgaagagacaatgaccaccagcccggggactcctgccccagctgctgaagagacaatgaccaccagcccggggactcctgcctcttctcattacctctcatgcaccatcgtagggatcatagttctaattgtgcttctgattgtgtttgtttga

SEQ ID NO: 289 - DNA, 1161 bp, Homo sapiens
  TNFRSF10D
atgggactttggggacaaagcgtcccgaccgcctcgagcgctcgagcagggcgctatccaggagccaggacagcgtcgggaaccagaccatggctcctggaccccaagatccttaagttcgtcgtcttcatcgtcgcggttctgctgccggtccgggttgactctgccaccatcccccggcaggacgaagttccccagcagacagtggccccacagcaacagaggcgcagcctcaaggaggaggagtgtccagcaggatctcatagatcagaatatactggagcctgtaacccgtgcacagagggtgtggattacaccattgcttccaacaatttgccttcttgcctgctatgtacagtttgtaaatcaggtcaaacaaataaaagttcctgtaccacgaccagagacaccgtgtgtcagtgtgaaaaaggaagcttccaggataaaaactcccctgagatgtgccggacgtgtagaacagggtgtcccagagggatggtcaaggtcagtaattgtacgccccggagtgacatcaagtgcaaaaatgaatcagctgccagttccactgggaaaaccccagcagcggaggagacagtgaccaccatcctggggatgcttgcctctccctatcactaccttatcatcatagtggttttagtcatcattttagctgtggttgtggttggcttttcatgtcggaagaaattcatttcttacctcaaaggcatctgctcaggtggtggaggaggtcccgaacgtgtgcacagagtccttttccggcggcgttcatgtccttcacgagttcctggggcggaggacaatgcccgcaacgagaccctgagtaacagatacttgcagcccacccaggtctctgagcaggaaatccaaggtcaggagctggcagagctaacaggtgtgactgtagagttgccagaggagccacagcgtctgctggaacaggcagaagctgaagggtgtcagaggaggaggctgctggttccagtgaatgacgctgactccgctgacatcagcaccttgctggatgcctcggcaacactggaagaaggacatgcaaaggaaacaattcaggaccaactggtgggctccgaaaagctcttttatgaagaagatgaggcaggctctgctacgtcctgcctgtga

SEQ ID NO: 290 - DNA, 1851 bp, Homo sapiens
  TNFRSF11A
atggccccgcgcgcccggcggcgccgcccgctgttcgcgctgctgctgctctgcgcgctgctcgcccggctgcaggtggctttgcagatcgctcctccatgtaccagtgagaagcattatgagcatctgggacggtgctgtaacaaatgtgaaccaggaaagtacatgtcttctaaatgcactactacctctgacagtgtatgtctgccctgtggcccggatgaatacttggatagctggaatgaagaagataaatgcttgctgcataaagtttgtgatacaggcaaggccctggtggccgtggtcgccggcaacagcacgaccccccggcgctgcgcgtgcacggctgggtaccactggagccaggactgcgagtgctgccgccgcaacaccgagtgcgcgccgggcctgggcgcccagcacccgttgcagctcaacaaggacacagtgtgcaaaccttgccttgcaggctacttctctgatgccttttcctccacggacaaatgcagaccctggaccaactgtaccttccttggaaagagagtagaacatcatgggacagagaaatccgatgcggtttgcagttcttctctgccagctagaaaaccaccaaatgaaccccatgtttacttgcccggtttaataattctgcttctcttcgcgtctgtggccctggtggctgccatcatctttggcgtttgctataggaaaaaagggaaagcactcacagctaatttgtggcactggatcaatgaggcttgtggccgcctaagtggagataaggagtcctcaggtgacagttgtgtcagtacacacacggcaaactttggtcagcagggagcatgtgaaggtgtcttactgctgactctggaggagaagacatttccagaagatatgtgctacccagatcaaggtggtgtctgtcagggcacatgtgtaggaggtggtccctacgcacaaggcgaagatgccaggatgctctcattggtcagcaagaccgagatagaggaagacagcttcagacagatgcccacagaagatgaatacatggacaggccctcccagcccacagaccagttactgttcctcactgagcctggaagcaaatccacacctcctttctctgaacccctggaggtgggggagaatgacagtttaagccagtgcttcacggggacacagagcacagtgggttcagaaagctgcaactgcactgagcccctgtgcaggactgattggactcccatgtcctctgaaaactacttgcaaaaagaggtggacagtggccattgcccgcactgggcagccagccccagccccaactgggcagatgtctgcacaggctgccggaaccctcctggggaggactgtgaacccctcgtgggttccccaaaacgtggacccttgccccagtgcgcctatggcatgggccttccccctgaagaagaagccagcaggacggaggccagagaccagcccgaggatggggctgatgggaggctcccaagctcagcgagggcaggtgccgggtctggaagctcccctggtggccagtcccctgcatctggaaatgtgactggaaacagtaactccacgttcatctccagcgggcaggtgatgaacttcaagggcgacatcatcgtggtctacgtcagccagacctcgcaggagggcgcggcggcggctgcggagcccatgggccgcccggtgcaggaggagaccctggcgcgccgagactccttcgcggggaacggcccgcgcttcccggacccgtgcggcggccccgaggggctgcgggagccggagaaggcctcgaggccggtgcaggagcaaggcggggccaaggcttga

SEQ ID NO: 291 - DNA, 1206 bp, Homo sapiens
  TNFRSF11B
atgaacaacttgctgtgctgcgcgctcgtgtttctggacatctccattaagtggaccacccaggaaacgtttcctccaaagtaccttcattatgacgaagaaacctctcatcagctgttgtgtgacaaatgtcctcctggtacctacctaaaacaacactgtacagcaaagtggaagaccgtgtgcgccccttgccctgaccactactacacagacagctggcacaccagtgacgagtgtctatactgcagccccgtgtgcaaggagctgcagtacgtcaagcaggagtgcaatcgcacccacaaccgcgtgtgcgaatgcaaggaagggcgctaccttgagatagagttctgcttgaaacataggagctgccctcctggatttggagtggtgcaagctggaaccccagagcgaaatacagtttgcaaaagatgtccagatgggttcttctcaaatgagacgtcatctaaagcaccctgtagaaaacacacaaattgcagtgtctttggtctcctgctaactcagaaaggaaatgcaacacacgacaacatatgttccggaaacagtgaatcaactcaaaaatgtggaatagatgttaccctgtgtgaggaggcattcttcaggtttgctgttcctacaaagtttacgcctaactggcttagtgtcttggtagacaatttgcctggcaccaaagtaaacgcagagagtgtagagaggataaaacggcaacacagctcacaagaacagactttccagctgctgaagttatggaaacatcaaaacaaagaccaagatatagtcaagaagatcatccaagatattgacctctgtgaaaacagcgtgcagcggcacattggacatgctaacctcaccttcgagcagcttcgtagcttgatggaaagcttaccgggaaagaaagtgggagcagaagacattgaaaaaacaataaaggcatgcaaacccagtgaccagatcctgaagctgctcagtttgtggcgaataaaaaatggcgaccaagacaccttgaagggcctaatgcacgcactaaagcactcaaagacgtaccactttcccaaaactgtcactcagagtctaaagaagaccatcaggttccttcacagcttcacaatgtacaaattgtatcagaagttatttttagaaatgataggtaaccaggtccaatcagtaaaaataagctgcttataa

SEQ ID NO: 292 - DNA, 390 bp, Homo sapiens
  TNFRSF12A
atggctcggggctcgctgcgccggttgctgcggctcctcgtgctggggctctggctggcgttgctgcgctccgtggccggggagcaagcgccaggcaccgccccctgctcccgcggcagctcctggagcgcggacctggacaagtgcatggactgcgcgtcttgcagggcgcgaccgcacagcgacttctgcctgggctgcgctgcagcacctcctgcccccttccggctgctttggcccatccttgggggcgctctgagcctgaccttcgtgctggggctgctttctggctttttggtctggagacgatgccgcaggagagagaagttcaccacccccatagaggagaccggcggagagggctgcccagctgtggcgctgatccagtga

SEQ ID NO: 293 - DNA, 882 bp, Homo sapiens
  TNFRSF13B
atgagtggcctgggccggagcaggcgaggtggccggagccgtgtggaccaggaggagcgctttccacagggcctgtggacgggggtggctatgagatcctgccccgaagagcagtactgggatcctctgctgggtacctgcatgtcctgcaaaaccatttgcaaccatcagagccagcgcacctgtgcagccttctgcaggtcactcagctgccgcaaggagcaaggcaagttctatgaccatctcctgagggactgcatcagctgtgcctccatctgtggacagcaccctaagcaatgtgcatacttctgtgagaacaagctcaggagcccagtgaaccttccaccagagctcaggagacagcggagtggagaagttgaaaacaattcagacaactcgggaaggtaccaaggattggagcacagaggctcagaagcaagtccagctctcccggggctgaagctgagtgcagatcaggtggccctggtctacagcacgctggggctctgcctgtgtgccgtcctctgctgcttcctggtggcggtggcctgcttcctcaagaagaggggggatccctgctcctgccagccccgctcaaggccccgtcaaagtccggccaagtcttcccaggatcacgcgatggaagccggcagccctgtgagcacatcccccgagccagtggagacctgcagcttctgcttccctgagtgcagggcgcccacgcaggagagcgcagtcacgcctgggacccccgaccccacttgtgctggaaggtgggggtgccacaccaggaccacagtcctgcagccttgcccacacatcccagacagtggccttggcattgtgtgtgtgcctgcccaggaggggggcccaggtgcataa

SEQ ID NO: 294 - DNA, 555 bp, Homo sapiens
  TNFRSF13C
atgaggcgagggccccggagcctgcggggcagggacgcgccagcccccacgccctgcgtcccggccgagtgcttcgacctgctggtccgccactgcgtggcctgcgggctcctgcgcacgccgcggccgaaaccggccggggccagcagccctgcgcccaggacggcgctgcagccgcaggagtcggtgggcgcgggggccggcgaggcggcgctgcccctgcccgggctgctctttggcgcccccgcgctgctgggcctggcactggtcctggcgctggtcctggtgggtctggtgagctggaggcggcgacagcggcggcttcgcggcgcgtcctccgcagaggcccccgacggagacaaggacgccccagagcccctggacaaggtcatcattctgtctccgggaatctctgatgccacagctcctgcctggcctcctcctggggaagacccaggaaccaccccacctggccacagtgtccctgtgccagccacagagctgggctccactgaactggtgaccaccaagacggccggccctgagcaacaatag

SEQ ID NO: 295 - DNA, 852 bp, Homo sapiens
  TNFRSF14
atggagcctcctggagactgggggcctcctccctggagatccacccccaaaaccgacgtcttgaggctggtgctgtatctcaccttcctgggagccccctgctacgccccagctctgccgtcctgcaaggaggacgagtacccagtgggctccgagtgctgccccaagtgcagtccaggttatcgtgtgaaggaggcctgcggggagctgacgggcacagtgtgtgaaccctgccctccaggcacctacattgcccacctcaatggcctaagcaagtgtctgcagtgccaaatgtgtgacccagccatgggcctgcgcgcgagccggaactgctccaggacagagaacgccgtgtgtggctgcagcccaggccacttctgcatcgtccaggacggggaccactgcgccgcgtgccgcgcttacgccacctccagcccgggccagagggtgcagaagggaggcaccgagagtcaggacaccctgtgtcagaactgccccccggggaccttctctcccaatgggaccctggaggaatgtcagcaccagaccaagtgcagctggctggtgacgaaggccggagctgggaccagcagctcccactgggtatggtggtttctctcagggagcctcgtcatcgtcattgtttgctccacagttggcctaatcatatgtgtgaaaagaagaaagccaaggggtgatgtagtcaaggtgatcgtctccgtccagcggaaaagacaggaggcagaaggtgaggccacagtcattgaggccctgcaggcccctccggacgtcaccacggtggccgtggaggagacaataccctcattcacggggaggagcccaaaccactga

SEQ ID NO: 296 - DNA, 1284 bp, Homo sapiens
  NGFR
atgggggcaggtgccaccggccgcgccatggacgggccgcgcctgctgctgttgctgcttctgggggtgtcccttggaggtgccaaggaggcatgccccacaggcctgtacacacacagcggtgagtgctgcaaagcctgcaacctgggcgagggtgtggcccagccttgtggagccaaccagaccgtgtgtgagccctgcctggacagcgtgacgttctccgacgtggtgagcgcgaccgagccgtgcaagccgtgcaccgagtgcgtggggctccagagcatgtcggcgccgtgcgtggaggccgacgacgccgtgtgccgctgcgcctacggctactaccaggatgagacgactgggcgctgcgaggcgtgccgcgtgtgcgaggcgggctcgggcctcgtgttctcctgccaggacaagcagaacaccgtgtgcgaggagtgccccgacggcacgtattccgacgaggccaaccacgtggacccgtgcctgccctgcaccgtgtgcgaggacaccgagcgccagctccgcgagtgcacacgctgggccgacgccgagtgcgaggagatccctggccgttggattacacggtccacacccccagagggctcggacagcacagcccccagcacccaggagcctgaggcacctccagaacaagacctcatagccagcacggtggcaggtgtggtgaccacagtgatgggcagctcccagcccgtggtgacccgaggcaccaccgacaacctcatccctgtctattgctccatcctggctgctgtggttgtgggccttgtggcctacatagccttcaagaggtggaacagctgcaagcagaacaagcaaggagccaacagccggccagtgaaccagacgcccccaccagagggagaaaaactccacagcgacagtggcatctccgtggacagccagagcctgcatgaccagcagccccacacgcagacagcctcgggccaggccctcaagggtgacggaggcctctacagcagcctgcccccagccaagcgggaggaggtggagaagcttctcaacggctctgcgggggacacctggcggcacctggcgggcgagctgggctaccagcccgagcacatagactcctttacccatgaggcctgccccgttcgcgccctgcttgcaagctgggccacccaggacagcgccacactggacgccctcctggccgccctgcgccgcatccagcgagccgacctcgtggagagtctgtgcagtgagtccactgccacatccccggtgtga

SEQ ID NO: 297 - DNA, 555 bp, Homo sapiens
  TNFRSF17
atgttgcagatggctgggcagtgctcccaaaatgaatattttgacagtttgttgcatgcttgcataccttgtcaacttcgatgttcttctaatactcctcctctaacatgtcagcgttattgtaatgcaagtgtgaccaattcagtgaaaggaacgaatgcgattctctggacctgtttgggactgagcttaataatttctttggcagttttcgtgctaatgtttttgctaaggaagataaactctgaaccattaaaggacgagtttaaaaacacaggatcaggtctcctgggcatggctaacattgacctggaaaagagcaggactggtgatgaaattattcttccgagaggcctcgagtacacggtggaagaatgcacctgtgaagactgcatcaagagcaaaccgaaggtcgactctgaccattgctttccactcccagctatggaggaaggcgcaaccattcttgtcaccacgaaaacgaatgactattgcaagagcctgccagctgctttgagtgctacggagatagagaaatcaatttctgctaggtaa

SEQ ID NO: 298 - DNA, 1254 bp, Homo sapiens
  TNFRSF19
atggctttaaaagtgctactagaacaagagaaaacgtttttcactcttttagtattactaggctatttgtcatgtaaagtgacttgtgaatcaggagactgtagacagcaagaattcagggatcggtctggaaactgtgttccctgcaaccagtgtgggccaggcatggagttgtctaaggaatgtggcttcggctatggggaggatgcacagtgtgtgacgtgccggctgcacaggttcaaggaggactggggcttccagaaatgcaagccctgtctggactgcgcagtggtgaaccgctttcagaaggcaaattgttcagccaccagtgatgccatctgcggggactgcttgccaggattttataggaagacgaaacttgtcggctttcaagacatggagtgtgtgccttgtggagaccctcctcctccttacgaaccgcactgtgccagcaaggtcaacctcgtgaagatcgcgtccacggcctccagcccacgggacacggcgctggctgccgttatctgcagcgctctggccaccgtcctgctggccctgctcatcctctgtgtcatctattgtaagagacagtttatggagaagaaacccagctggtctctgcggtcacaggacattcagtacaacggctctgagctgtcgtgttttgacagacctcagctccacgaatatgcccacagagcctgctgccagtgccgccgtgactcagtgcagacctgcgggccggtgcgcttgctcccatccatgtgctgtgaggaggcctgcagccccaacccggcgactcttggttgtggggtgcattctgcagccagtcttcaggcaagaaacgcaggcccagccggggagatggtgccgactttcttcggatccctcacgcagtccatctgtggcgagttttcagatgcctggcctctgatgcagaatcccatgggtggtgacaacatctctttttgtgactcttatcctgaactcactggagaagacattcattctctcaatccagaacttgaaagctcaacgtctttggattcaaatagcagtcaagatttggttggtggggctgttccagtccagtctcattctgaaaactttacagcagctactgatttatctagatataacaacacactggtagaatcagcatcaactcaggatgcactaactatgagaagccagctagatcaggagagtggtgctgtcatccacccagccactcagacgtccctccaggaagcttaa

SEQ ID NO: 299 - DNA, 1293 bp, Homo sapiens
  RELT
atgaagccaagtctgctgtgccggcccctgtcctgcttccttatgctgctgccctggcctctcgccaccctgacatcaacaaccctttggcagtgcccacctggggaggagcccgacctggacccagggcagggcacattatgcaggccctgccccccaggcaccttctcagctgcatggggctccagcccatgccagccccatgcccgttgcagcctttggaggaggctggaggcccaggtgggcatggcaactcgagatacactctgtggagactgctggcctgggtggtttgggccttggggggttccccgcgttccatgtcaaccatgttcctgggcacctctgggtactcatggctgtgatgagtgggggcggcgggcccgacgtggcgtggaggtggcagcaggggccagcagcggtggtgagacacggcagcctgggaacggcacccgggcaggtggcccagaggagacagccgcccagtacgcggtcatcgccatcgtccctgtcttctgcctcatggggctgttgggcatcctggtgtgcaacctcctcaagcggaagggctaccactgcacggcgcacaaggaggtcgggcccggccctggaggtggaggcagtggaatcaaccctgcctaccggactgaggatgccaatgaggacaccattggggtcctggtgcgcttgatcacagagaagaaagagaatgctgcggccctggaggagctgctgaaagagtaccacagcaaacagctggtgcagacgagccacaggcctgtgtccaagctgccgccagcgcccccgaacgtgccacacatctgcccgcaccgccaccatctccacaccgtgcagggcctggcctcgctctctggcccctgctgctcccgctgtagccagaagaagtggcccgaggtgctgctgtcccctgaggctgtagccgccactactcctgttcccagccttctgcctaacccgaccagggttcccaaggccggggccaaggcagggcgtcagggcgagatcaccatcttgtctgtgggcaggttccgcgtggctcgaattcctgagcagcggacaagttcaatggtgtctgaggtgaagaccatcacggaggctgggccctcgtggggtgatctccctgactccccacagcctggcctcccccctgagcagcaggccctgctaggaagtggcggaagccgtacaaagtggctgaagcccccagcagagaacaaggccgaggagaaccgctatgtggtccggctaagtgagagcaacctggtcatctga

SEQ ID NO: 300 - DNA, 1968 bp, Homo sapiens
  TNFRSF21
atggggacctctccgagcagcagcaccgccctcgcctcctgcagccgcatcgcccgccgagccacagccacgatgatcgcgggctcccttctcctgcttggattccttagcaccaccacagctcagccagaacagaaggcctcgaatctcattggcacataccgccatgttgaccgtgccaccggccaggtgctaacctgtgacaagtgtccagcaggaacctatgtctctgagcattgtaccaacacaagcctgcgcgtctgcagcagttgccctgtggggacctttaccaggcatgagaatggcatagagaaatgccatgactgtagtcagccatgcccatggccaatgattgagaaattaccttgtgctgccttgactgaccgagaatgcacttgcccacctggcatgttccagtctaacgctacctgtgccccccatacggtgtgtcctgtgggttggggtgtgcggaagaaagggacagagactgaggatgtgcggtgtaagcagtgtgctcggggtaccttctcagatgtgccttctagtgtgatgaaatgcaaagcatacacagactgtctgagtcagaacctggtggtgatcaagccggggaccaaggagacagacaacgtctgtggcacactcccgtccttctccagctccacctcaccttcccctggcacagccatctttccacgccctgagcacatggaaacccatgaagtcccttcctccacttatgttcccaaaggcatgaactcaacagaatccaactcttctgcctctgttagaccaaaggtactgagtagcatccaggaagggacagtccctgacaacacaagctcagcaagggggaaggaagacgtgaacaagaccctcccaaaccttcaggtagtcaaccaccagcaaggcccccaccacagacacatcctgaagctgctgccgtccatggaggccactgggggcgagaagtccagcacgcccatcaagggccccaagaggggacatcctagacagaacctacacaagcattttgacatcaatgagcatttgccctggatgattgtgcttttcctgctgctggtgcttgtggtgattgtggtgtgcagtatccggaaaagctcgaggactctgaaaaaggggccccggcaggatcccagtgccattgtggaaaaggcagggctgaagaaatccatgactccaacccagaaccgggagaaatggatctactactgcaatggccatggtatcgatatcctgaagcttgtagcagcccaagtgggaagccagtggaaagatatctatcagtttctttgcaatgccagtgagagggaggttgctgctttctccaatgggtacacagccgaccacgagcgggcctacgcagctctgcagcactggaccatccggggccccgaggccagcctcgcccagctaattagcgccctgcgccagcaccggagaaacgatgttgtggagaagattcgtgggctgatggaagacaccacccagctggaaactgacaaactagctctcccgatgagccccagcccgcttagcccgagccccatccccagccccaacgcgaaacttgagaattccgctctcctgacggtggagccttccccacaggacaagaacaagggcttcttcgtggatgagtcggagccccttctccgctgtgactctacatccagcggctcctccgcgctgagcaggaacggttcctttattaccaaagaaaagaaggacacagtgttgcggcaggtacgcctggacccctgtgacttgcagcctatctttgatgacatgctccactttctaaatcctgaggagctgcgggtgattgaagagattccccaggctgaggacaaactagaccggctattcgaaattattggagtcaagagccaggaagccagccagaccctcctggactctgtttatagccatcttcctgacctgctgtag

SEQ ID NO: 301 - DNA, 1254 bp, Homo sapiens
  TNFRSF25
atggagcagcggccgcggggctgcgcggcggtggcggcggcgctcctcctggtgctgctgggggcccgggcccagggcggcactcgtagccccaggtgtgactgtgccggtgacttccacaagaagattggtctgttttgttgcagaggctgcccagcggggcactacctgaaggccccttgcacggagccctgcggcaactccacctgccttgtgtgtccccaagacaccttcttggcctgggagaaccaccataattctgaatgtgcccgctgccaggcctgtgatgagcaggcctcccaggtggcgctggagaactgttcagcagtggccgacacccgctgtggctgtaagccaggctggtttgtggagtgccaggtcagccaatgtgtcagcagttcacccttctactgccaaccatgcctagactgcggggccctgcaccgccacacacggctactctgttcccgcagagatactgactgtgggacctgcctgcctggcttctatgaacatggcgatggctgcgtgtcctgccccacgagcaccctggggagctgtccagagcgctgtgccgctgtctgtggctggaggcagatgttctgggtccaggtgctcctggctggccttgtggtccccctcctgcttggggccaccctgacctacacataccgccactgctggcctcacaagcccctggttactgcagatgaagctgggatggaggctctgaccccaccaccggccacccatctgtcacccttggacagcgcccacacccttctagcacctcctgacagcagtgagaagatctgcaccgtccagttggtgggtaacagctggacccctggctaccccgagacccaggaggcgctctgcccgcaggtgacatggtcctgggaccagttgcccagcagagctcttggccccgctgctgcgcccacactctcgccagagtccccagccggctcgccagccatgatgctgcagccgggcccgcagctctacgacgtgatggacgcggtcccagcgcggcgctggaaggagttcgtgcgcacgctggggctgcgcgaggcagagatcgaagccgtggaggtggagatcggccgcttccgagaccagcagtacgagatgctcaagcgctggcgccagcagcagcccgcgggcctcggagccgtttacgcggccctggagcgcatggggctggacggctgcgtggaagacttgcgcagccgcctgcagcgcggcccgtga

SEQ ID NO: 302 - DNA, 1347 bp, Homo sapiens
  EDAR
atggcccatgtgggggactgcacgcagacgccctggctccccgtcctggtggtgtctctgatgtgctcagcccgagcggaatactcaaactgcggtgagaacgagtactacaaccagactacggggctgtgccaggagtgccccccgtgtgggccgggagaggagccctacctgtcctgtggctacggcaccaaagacgaggactacggctgcgtcccctgcccggcggagaagttttccaaaggaggctaccagatatgcaggcgtcacaaagactgtgagggcttcttccgggccaccgtgctgacaccaggggacatggagaatgacgctgagtgtggcccttgcctccctggctactacatgctggagaacagaccgaggaacatctatggcatggtctgctactcctgcctcctggcaccccccaacaccaaggaatgtgtgggagccacttcaggagcttctgccaacttccctggcacctcgggcagcagcaccctgtctcccttccagcacgcccacaaagaactctcaggccaaggacacctggccactgccctgatcattgcaatgtccaccatcttcatcatggccatcgccatcgtcctcatcatcatgttctacatcctgaagacaaagccctctgccccagcctgttgcaccagccacccggggaagagcgtggaggcccaagtgagcaaggacgaggagaagaaagaggccccagacaacgtggtgatgttctccgagaaggatgaatttgagaagctgacagcaactccagcaaagcccaccaagagcgagaacgatgcctcatccgagaatgagcagctgctgagccggagcgtcgacagtgatgaggagcccgcccctgacaagcagggctccccggagctgtgcctgctgtcgctggttcacctggccagggagaagtctgccaccagcaacaagtcagccgggattcaaagccggaggaaaaagatcctcgatgtgtatgccaacgtgtgtggagtcgtggaaggtcttagccccacggagctgccatttgattgcctcgagaagactagccgaatgctcagctccacgtacaactctgagaaggctgttgtgaaaacgtggcgccacctcgccgagagcttcggcctgaagagggatgagattgggggcatgacagacggcatgcaactctttgaccgcatcagcacggcaggctacagcatccctgagctactcacaaaactggtgcagattgagcggctggatgctgtggagtccttgtgtgcagacatactggagtgggcgggggttgtgccacctgcctcccagccacatgctgcatcctga

SEQ ID NO: 303 - DNA, 894 bp, Homo sapiens
  EDA2R
atggattgccaagaaaatgagtactgggaccaatggggacggtgtgtcacctgccaacggtgtggtcctggacaggagctatccaaggattgtggttatggagagggtggagatgcctactgcacagcctgccctcctcgcaggtacaaaagcagctggggccaccacagatgtcagagttgcatcacctgtgctgtcatcaatcgtgttcagaaggtcaactgcacagctacctctaatgctgtctgtggggactgtttgcccaggttctaccgaaagacacgcattggaggcctgcaggaccaagagtgcatcccgtgcacgaagcagacccccacctctgaggttcaatgtgccttccagttgagcttagtggaggcagatacacccacagtgccccctcaggaggccacacttgttgcactggtgagcagcctgctagtggtgtttaccctggccttcctggggctcttcttcctctactgcaagcagttcttcaacagacattgccagcgtggaggtttgctgcagtttgaggctgataaaacagcaaaggaggaatctctcttccccgtgccacccagcaaggagaccagtgctgagtcccaagtgagtgagaacatctttcagacccagccacttaaccctatcctcgaggacgactgcagctcgactagtggcttccccacacaggagtcctttaccatggcctcctgcacctcagagagccactcccactgggtccacagccccatcgaatgcacagagctggacctgcaaaagttttccagctctgcctcctatactggagctgagaccttggggggaaacacagtcgaaagcactggagacaggctggagctcaatgtgccctttgaagttcccagcccttaa

SEQ ID NO: 304 - DNA, 1137 bp, Artificial Sequence
  STING (R232 Allele)
  allele (694)...(696): nnn = CGT, CGC, CGA, CGG, AGA or AGG
atgccccactccagcctgcatccatccatcccgtgtcccaggggtcacggggcccagaaggcagccttggttctgctgagtgcctgcctggtgaccctttgggggctaggagagccaccagagcacactctccggtacctggtgctccacctagcctccctgcagctgggactgctgttaaacggggtctgcagcctggctgaggagctgcgccacatccactccaggtaccggggcagctactggaggactgtgcgggcctgcctgggctgccccctccgccgtggggccctgttgctgctgtccatctatttctactactccctcccaaatgcggtcggcccgcccttcacttggatgcttgccctcctgggcctctcgcaggcactgaacatcctcctgggcctcaagggcctggccccagctgagatctctgcagtgtgtgaaaaagggaatttcaacgtggcccatgggctggcatggtcatattacatcggatatctgcggctgatcctgccagagctccaggcccggattcgaacttacaatcagcattacaacaacctgctacggggtgcagtgagccagcggctgtatattctcctcccattggactgtggggtgcctgataacctgagtatggctgaccccaacattcgcttcctggataaactgccccagcagaccggtgacnnngctggcatcaaggatcgggtttacagcaacagcatctatgagcttctggagaacgggcagcgggcgggcacctgtgtcctggagtacgccacccccttgcagactttgtttgccatgtcacaatacagtcaagctggctttagccgggaggataggcttgagcaggccaaactcttctgccggacacttgaggacatcctggcagatgcccctgagtctcagaacaactgccgcctcattgcctaccaggaacctgcagatgacagcagcttctcgctgtcccaggaggttctccggcacctgcggcaggaggaaaaggaagaggttactgtgggcagcttgaagacctcagcggtgcccagtacctccacgatgtcccaagagcctgagctcctcatcagtggaatggaaaagcccctccctctccgcacggatttctct

SEQ ID NO: 305 - protein, 379 aa, Homo sapiens [sequence omitted]

SEQ ID NO: 306 - protein, 379 aa, Homo sapiens
  Human STING (H232 Allele)
MPHSSLHPSIPCPRGHGAQKAALVLLSACLVTLWGLGEPPEHTLRYLVLHLASLQLGLLLNGVCSLAEELRHIHSRYRGSYWRTVRACLGCPLRRGALLLLSIYFYYSLPNAVGPPFTWMLALLGLSQALNILLGLKGLAPAEISAVCEKGNFNVAHGLAWSYYIGYLRLILPELQARIRTYNQHYNNLLRGAVSQRLYILLPLDCGVPDNLSMADPNIRFLDKLPQQTGDHAGIKDRVYSNSIYELLENGQRAGTCVLEYATPLQTLFAMSQYSQAGFSREDRLEQAKLFCRTLEDILADAPESQNNCRLIAYQEPADDSSFSLSQEVLRHLRQEEKEEVTVGSLKTSAVPSTSTMSQEPELLISGMEKPLPLRTDFS

SEQ ID NO: 307 - protein, 379 aa, Homo sapiens [sequence omitted]

SEQ ID NO: 308 - protein, 379 aa, Homo sapiens
  Human STING (HAQ allele; R71H/G230A/R293Q)
MPHSSLHPSIPCPRGHGAQKAALVLLSACLVTLWGLGEPPEHTLRYLVLHLASLQLGLLLNGVCSLAEELHHIHSRYRGSYWRTVRACLGCPLRRGALLLLSIYFYYSLPNAVGPPFTWMLALLGLSQALNILLGLKGLAPAEISAVCEKGNFNVAHGLAWSYYIGYLRLILPELQARIRTYNQHYNNLLRGAVSQRLYILLPLDCGVPDNLSMADPNIRFLDKLPQQTADHAGIKDRVYSNSIYELLENGQRAGTCVLEYATPLQTLFAMSQYSQAGFSREDRLEQAKLFCQTLEDILADAPESQNNCRLIAYQEPADDSSFSLSQEVLRHLRQEEKEEVTVGSLKTSAVPSTSTMSQEPELLISGMEKPLPLRTDFS

SEQ ID NO: 309 - protein, 379 aa, Homo sapiens
  Human STING (AQ allele; G230A/R293Q)
MPHSSLHPSIPCPRGHGAQKAALVLLSACLVTLWGLGEPPEHTLRYLVLHLASLQLGLLLNGVCSLAEELRHIHSRYRGSYWRTVRACLGCPLRRGALLLLSIYFYYSLPNAVGPPFTWMLALLGLSQALNILLGLKGLAPAEISAVCEKGNFNVAHGLAWSYYIGYLRLILPELQARIRTYNQHYNNLLRGAVSQRLYILLPLDCGVPDNLSMADPNIRFLDKLPQQTADHAGIKDRVYSNSIYELLENGQRAGTCVLEYATPLQTLFAMSQYSQAGFSREDRLEQAKLFCQTLEDILADAPESQNNCRLIAYQEPADDSSFSLSQEVLRHLRQEEKEEVTVGSLKTSAVPSTSTMSQEPELLISGMEKPLPLRTDFS

SEQ ID NO: 310 - protein, 1025 aa, Homo sapiens [sequence omitted]

SEQ ID NO: 311 - protein, 925 aa, Homo sapiens
  RIG-I/DDX58
MTTEQRRSLQAFQDYIRKTLDPTYILSYMAPWFREEEVQYIQAEKNNKGPMEAATLFLKFLLELQEEGWFRGFLDALDHAGYSGLYEAIESWDFKKIEKLEEYRLLLKRLQPEFKTRIIPTDIISDLSECLINQECEEILQICSTKGMMAGAEKLVECLLRSDKENWPKTLKLALEKERNKFSELWIVEKGIKDVETEDLEDKMETSDIQIFYQEDPECQNLSENSCPPSEVSDTNLYSPFKPRNYQLELALPAMKGKNTIICAPTGCGKTFVSLLICEHHLKKFPQGQKGKVVFFANQIPVYEQQKSVFSKYFERHGYRVTGISGATAENVPVEQIVENNDIIILTPQILVNNLKKGTIPSLSIFTLMIFDECHNTSKQHPYNMIMFNYLDQKLGGSSGPLPQVIGLTASVGVGDAKNTDEALDYICKLCASLDASVIATVKHNLEELEQVVYKPQKFFRKVESRISDKFKYIIAQLMRDTESLAKRICKDLENLSQIQNREFGTQKYEQWIVTVQKACMVFQMPDKDEESRICKALFLYTSHLRKYNDALIISEHARMKDALDYLKDFFSNVRAAGFDEIEQDLTQRFEEKLQELESVSRDPSNENPKLEDLCFILQEEYHLNPETITILFVKTRALVDALKNWIEGNPKLSFLKPGILTGRGKTNQNTGMTLPAQKCILDAFKASGDHNILIATSVADEGIDIAQCNLVILYEYVGNVIKMIQTRGRGRARGSKCFLLTSNAGVIEKEQINMYKEKMMNDSILRLQTWDEAVFREKILHIQTHEKFIRDSQEKPKPVPDKENKKLLCRKCKALACYTADVRVIEECHYTVLGDAFKECFVSRPHPKPKQFSSFEKRAKIFCARQNCSHDWGIHVKYKTFEIPVIKIESFVVEDIATGVQTLYSKWKDFHFEKIPFDPAEMSK

SEQ ID NO: 312 - protein, 427 aa, Homo sapiens
  IRF-3, isofom 1
MGTPKPRILPWLVSQLDLGQLEGVAWVNKSRTRFRIPWKHGLRQDAQQEDFGIFQAWAEATGAYVPGRDKPDLPTWKRNFRSALNRKEGLRLAEDRSKDPHDPHKIYEFVNSGVGDFSQPDTSPDTNGGGSTSDTQEDILDELLGNMVLAPLPDPGPPSLAVAPEPCPQPLRSPSLDNPTPFPNLGPSENPLKRLLVPGEEWEFEVTAFYRGRQVFQQTISCPEGLRLVGSEVGDRTLPGWPVTLPDPGMSLTDRGVMSYVRHVLSCLGGGLALWRAGQWLWAQRLGHCHTYWAVSEELLPNSGHGPDGEVPKDKEGGVFDLGPFIVDLITFTEGSGRSPRYALWFCVGESWPQDQPWTKRLVMVKVVPTCLRALVEMARVGGASSLENTVDLHISNSHPLSLTSDQYKAYLQDLVEGMDFQGPGES

SEQ ID NO: 313 - protein, 503 aa, Homo sapiens
  IRF-7, isoform A
MALAPERAAPRVLFGEWLLGEISSGCYEGLQWLDEARTCFRVPWKHFARKDLSEADARIFKAWAVARGRWPPSSRGGGPPPEAETAERAGWKTNFRCALRSTRRFVMLRDNSGDPADPHKVYALSRELCWREGPGTDQTEAEAPAAVPPPQGGPPGPFLAHTHAGLQAPGPLPAPAGDKGDLLLQAVQQSCLADHLLTASWGADPVPTKAPGEGQEGLPLTGACAGGPGLPAGELYGWAVETTPSPGPQPAALTTGEAAAPESPHQAEPYLSPSPSACTAVQEPSPGALDVTIMYKGRTVLQKVVGHPSCTFLYGPPDPAVRATDPQQVAFPSPAELPDQKQLRYTEELLRHVAPGLHLELRGPQLWARRMGKCKVYWEVGGPPGSASPSTPACLLPRNCDTPIFDFRVFFQELVEFRARQRRGSPRYTIYLGFGQDLSAGRPKEKSLVLVKLEPWLCRVHLEGTQREGVSSLDSSSLSLCLSSANSLYDDIECFLMELEQPA

SEQ ID NO: 314 - DNA, 1184 bp, Artificial Sequence
  Elongation factor 1 (EF1) alpha promoter
cgtgaggctccggtgcccgtcagtgggcagagcgcacatcgcccacagtccccgagaagttggggggaggggtcggcaattgaaccggtgcctagagaaggtggcgcggggtaaactgggaaagtgatgtcgtgtactggctccgcctttttcccgagggtgggggagaaccgtatataagtgcagtagtcgccgtgaacgttctttttcgcaacgggtttgccgccagaacacaggtaagtgccgtgtgtggttcccgcgggcctggcctctttacgggttatggcccttgcgtgccttgaattacttccacctggctgcagtacgtgattcttgatcccgagcttcgggttggaagtgggtgggagagttcgaggccttgcgcttaaggagccccttcgcctcgtgcttgagttgaggcctggcctgggcgctggggccgccgcgtgcgaatctggtggcaccttcgcgcctgtctcgctgctttcgataagtctctagccatttaaaatttttgatgacctgctgcgacgctttttttctggcaagatagtcttgtaaatgcgggccaagatctgcacactggtatttcggtttttggggccgcgggcggcgacggggcccgtgcgtcccagcgcacatgttcggcgaggcggggcctgcgagcgcggccaccgagaatcggacgggggtagtctcaagctggccggcctgctctggtgcctggcctcgcgccgccgtgtatcgccccgccctgggcggcaaggctggcccggtcggcaccagttgcgtgagcggaaagatggccgcttcccggccctgctgcagggagctcaaaatggaggacgcggcgctcgggagagcgggcgggtgagtcacccacacaaaggaaaagggcctttccgtcctcagccgtcgcttcatgtgactccacggagtaccgggcgccgtccaggcacctcgattagttctcgagcttttggagtacgtcgtctttaggttggggggaggggttttatgcgatggagtttccccacactgagtgggtggagactgaagttaggccagcttggcacttgatgtaattctccttggaatttgccctttttgagtttggatcttggttcattctcaagcctcagacagtggttcaaagtttttttcttccatttcaggtgtcgtga

SEQ ID NO: 315 - DNA, 20 bp, Artificial Sequence
  pagp-1 primer
gcgtgacggttctgagtgct

SEQ ID NO: 316 - DNA, 21 bp, Artificial Sequence
  pagp-2 primer
cgtctttgctgccatcttccg

SEQ ID NO: 317 - DNA, 24 bp, Artificial Sequence
  pagp-3 primer
acaataacgacgactccgataagg

SEQ ID NO: 318 - DNA, 24 bp, Artificial Sequence
  pagp-4 primer
ctgctgaatgtgctgattaacctg

SEQ ID NO: 319 - DNA, 23 bp, Artificial Sequence
  ansb-1 primer
accttagaagatagccgcaaagc

SEQ ID NO: 320 - DNA, 25 bp, Artificial Sequence
  ansb-2 primer
cagagacatgacacccacgattatc

SEQ ID NO: 321 - DNA, 21 bp, Artificial Sequence
  ansb-3 primer
gcaaaccgctatccagaacga

SEQ ID NO: 322 - DNA, 24 bp, Artificial Sequence
  ansb-4 primer
agtttaagtatgccgtggtactgc

SEQ ID NO: 323 - DNA, 28 bp, Artificial Sequence
  csgd-1 primer
cacttgctttaagatttgtaatggctag

SEQ ID NO: 324 - DNA, 24 bp, Artificial Sequence
  csgd-2 primer
ggtgtattcgctttcccatttgtc

SEQ ID NO: 325 - DNA, 21 bp, Artificial Sequence
  csgd-3 primer
tgtgctgtccaggttaatgcc

SEQ ID NO: 326 - DNA, 23 bp, Artificial Sequence
  csgd-4 primer
gacgacggttttctcgaagtctc

SEQ ID NO: 327 - protein, 18 aa, Artificial Sequence
  T2A peptide
EGRGSLLTCGDVEENPGP

SEQ ID NO: 328 - protein, 19 aa, Artificial Sequence
  P2A peptide
ATNFSLLKQAGDVEENPGP

SEQ ID NO: 329 - protein, 20 aa, Artificial Sequence
  E2A peptide
QCTNYALLKLAGDVESNPGP

SEQ ID NO: 330 - protein, 22 aa, Artificial Sequence
  F2A peptide
VKQTLNFDLLKLAGDVESNPGP

SEQ ID NO: 331 - DNA, 3199 bp, Artificial Sequence
  Plasmid pSL0191
gacgaaagggcctcgtgatacgcctatttttataggttaatgtcatgataataatggtttcttagacgtcaggtggcacttttcggggaaatgtgcgcggaacccctatttgtttatttttctaaatacattcaaatatgtatccgctcatgagacaataaccctgataaatgcttcaataatattgaaaaaggaagagtatgagtattcaacatttccgtgtcgcccttattcccttttttgcggcattttgccttcctgtttttgctcacccagaaacgctggtgaaagtaaaagatgctgaagatcagttgggtgcacgagtgggttacatcgaactggatctcaacagcggtaagatccttgagagttttcgccccgaagaacgttttccaatgatgagcacttttaaagttctgctatgtggcgcggtattatcccgtattgacgccgggcaagagcaactcggtcgccgcatacactattctcagaatgacttggttgagtactcaccagtcacagaaaagcatcttacggatggcatgacagtaagagaattatgcagtgctgccataaccatgagtgataacactgcggccaacttacttctgacaacgatcggaggaccgaaggagctaaccgcttttttgcacaacatgggggatcatgtaactcgccttgatcgttgggaaccggagctgaatgaagccataccaaacgacgagcgtgacaccacgatgcctgtagcaatggcaacaacgttgcgcaaactattaactggcgaactacttactctagcttcccggcaacaattaatagactggatggaggcggataaagttgcaggaccacttctgcgctcggcccttccggctggctggtttattgctgataaatctggagccggtgagcgtgggtctcgcggtatcattgcagcactggggccagatggtaagccctcccgtatcgtagttatctacacgacggggagtcaggcaactatggatgaacgaaatagacagatcgctgagataggtgcctcactgattaagcattggtaactgtcagaccaagtttactcatatatactttagattgatttaaaacttcatttttaatttaaaaggatctaggtgaagatcctttttgataatctcatgaccaaaatcccttaacgtgagttttcgttccactgagcgtcagaccccgtagaaaagatcaaaggatcttcttgagatcctttttttctgcgcgtaatctgctgcttgcaaacaaaaaaaccaccgctaccagcggtggtttgtttgccggatcaagagctaccaactctttttccgaaggtaactggcttcagcagagcgcagataccaaatactgttcttctagtgtagccgtagttaggccaccacttcaagaactctgtagcaccgcctacatacctcgctctgctaatcctgttaccagtggctgctgccagtggcgataagtcgtgtcttaccgggttggactcaagacgatagttaccggataaggcgcagcggtcgggctgaacggggggttcgtgcacacagcccagcttggagcgaacgacctacaccgaactgagatacctacagcgtgagctatgagaaagcgccacgcttcccgaagggagaaaggcggacaggtatccggtaagcggcagggtcggaacaggagagcgcacgagggagcttccagggggaaacgcctggtatctttatagtcctgtcgggtttcgccacctctgacttgagcgtcgatttttgtgatgctcgtcaggggggcggagcctatggaaaaacgccagcaacgcggcctttttacggttcctggccttttgctggccttttgctcacatgttctttcctgcgttatcccctgattctgtggataaccgtattaccgcctttgagtgagctgataccgctcgccgcagccgaacgaccgagcgcagcgagtcagtgagcgaggaagcggaagagcgcccaatacgcaaaccgcctctccccgcgcgttggccgattcattaatgcagctggcacgacaggtttcccgactggaaagcgggcagtgagcgcaacgcaattaatgtgagttagctcactcattaggcaccccaggctttacactttatgcttccggctcgtatgttgtgtggaattgtgagcggataacaatttcacacaggaaacagctatgaccatgattacgccaagctcggcgcgccattgggatggaaccgcgtgacggttctgagtgctaaatcaaacgccgttaacccgatactctctcagattattctctgtttatagtttgttaagattttattcaggttaatgttgttattatcacagtcgaatttttgaacggtatgtatgttgcgatgatcatcagaaagtattttcttattattgctctccttttgatgccatggctggctattcgctagcctcaataagcttcttgcctttctgcaggttttgatggggaagggtatgcttcagttgtgaattaaaaagtcttaaaaaacaataagtagatagagttagctaaaaattaacgcgatatttatcactttttcgcaaagttcgactggacaaaatgcatcacaattgttgtactggtatccgacacagcatttgtgtctatttttcatgtaaaggtaattttgatgtctaagattaaaggtaacgttaagtggtttaatgaatccaaaggattcggtttcattactccggaagatggcagcaaagacgtggttccatcccaatacgcgtcaattcactggccgtcgttttacaacgtcgtgactgggaaaaccctggcgttacccaacttaatcgccttgcagcacatccccctttcgccagctggcgtaatagcgaagaggcccgcaccgatcgcccttcccaacagttgcgcagcctgaatggcgaatggcgcctgatgcggtattttctccttacgcatctgtgcggtatttcacaccgcatatggtgcactctcagtacaatctgctctgatgccgcatagttaagccagccccgacacccgccaacacccgctgacgcgccctgacgggcttgtctgctcccggcatccgcttacagacaagctgtgaccgtctccgggagctgcatgtgtcagaggttttcaccgtcatcaccgaaacgcgcga

SEQ ID NO: 332 - DNA, 3214 bp, Artificial Sequence
  Plasmid pSL0230
tcgcgcgtttcggtgatgacggtgaaaacctctgacacatgcagctcccggagacggtcacagcttgtctgtaagcggatgccgggagcagacaagcccgtcagggcgcgtcagcgggtgttggcgggtgtcggggctggcttaactatgcggcatcagagcagattgtactgagagtgcaccatatgcggtgtgaaataccgcacagatgcgtaaggagaaaataccgcatcaggcgccattcgccattcaggctgcgcaactgttgggaagggcgatcggtgcgggcctcttcgctattacgccagctggcgaaagggggatgtgctgcaaggcgattaagttgggtaacgccagggttttcccagtcacgacgttgtaaaacgacggccagtgaattgacgcgtattgggattgaccttagaagatagccgcaaagcgctggttggcagcctgaagtaatctttcctttttaaacaatggcgcagatcgtatctgcgcctttttattctgttttttcctgcattttgttatccatctctaaaaaatactctctgtcggatatatatcgctggttaatcgtatggcgtcacattattcgtctgcaatatagagataatgcgaccagttgacataactggagatataacatggctagcctcaataagcttcttgcctttctgcagaccaaggacccagattatgtgaagttgacgatgcaaaatacggctttgtcgcttccggcacgctgaacccgcaaaaagcgcgtgtcttactgcaactggcgttaacccagactaaagatccaaaacagatccagacgatgttcaatcagtattaaagataatgccccggtcggaaggccggggctatctttggaagacctctcgcacaaccaacactattatcttgctaattatcatcctggttatgataatcgtgggtgtcatgtctctggatcccaatggcgcgccgagcttggcgtaatcatggtcatagctgtttcctgtgtgaaattgttatccgctcacaattccacacaacatacgagccggaagcataaagtgtaaagcctggggtgcctaatgagtgagctaactcacattaattgcgttgcgctcactgcccgctttccagtcgggaaacctgtcgtgccagctgcattaatgaatcggccaacgcgcggggagaggcggtttgcgtattgggcgctcttccgcttcctcgctcactgactcgctgcgctcggtcgttcggctgcggcgagcggtatcagctcactcaaaggcggtaatacggttatccacagaatcaggggataacgcaggaaagaacatgtgagcaaaaggccagcaaaaggccaggaaccgtaaaaaggccgcgttgctggcgtttttccataggctccgcccccctgacgagcatcacaaaaatcgacgctcaagtcagaggtggcgaaacccgacaggactataaagataccaggcgtttccccctggaagctccctcgtgcgctctcctgttccgaccctgccgcttaccggatacctgtccgcctttctcccttcgggaagcgtggcgctttctcatagctcacgctgtaggtatctcagttcggtgtaggtcgttcgctccaagctgggctgtgtgcacgaaccccccgttcagcccgaccgctgcgccttatccggtaactatcgtcttgagtccaacccggtaagacacgacttatcgccactggcagcagccactggtaacaggattagcagagcgaggtatgtaggcggtgctacagagttcttgaagtggtggcctaactacggctacactagaagaacagtatttggtatctgcgctctgctgaagccagttaccttcggaaaaagagttggtagctcttgatccggcaaacaaaccaccgctggtagcggtggtttttttgtttgcaagcagcagattacgcgcagaaaaaaaggatctcaagaagatcctttgatcttttctacggggtctgacgctcagtggaacgaaaactcacgttaagggattttggtcatgagattatcaaaaaggatcttcacctagatccttttaaattaaaaatgaagttttaaatcaatctaaagtatatatgagtaaacttggtctgacagttaccaatgcttaatcagtgaggcacctatctcagcgatctgtctatttcgttcatccatagttgcctgactccccgtcgtgtagataactacgatacgggagggcttaccatctggccccagtgctgcaatgataccgcgagacccacgctcaccggctccagatttatcagcaataaaccagccagccggaagggccgagcgcagaagtggtcctgcaactttatccgcctccatccagtctattaattgttgccgggaagctagagtaagtagttcgccagttaatagtttgcgcaacgttgttgccattgctacaggcatcgtggtgtcacgctcgtcgtttggtatggcttcattcagctccggttcccaacgatcaaggcgagttacatgatcccccatgttgtgcaaaaaagcggttagctccttcggtcctccgatcgttgtcagaagtaagttggccgcagtgttatcactcatggttatggcagcactgcataattctcttactgtcatgccatccgtaagatgcttttctgtgactggtgagtactcaaccaagtcattctgagaatagtgtatgcggcgaccgagttgctcttgcccggcgtcaatacgggataataccgcgccacatagcagaactttaaaagtgctcatcattggaaaacgttcttcggggcgaaaactctcaaggatcttaccgctgttgagatccagttcgatgtaacccactcgtgcacccaactgatcttcagcatcttttactttcaccagcgtttctgggtgagcaaaaacaggaaggcaaaatgccgcaaaaaagggaataagggcgacacggaaatgttgaatactcatactcttcctttttcaatattattgaagcatttatcagggttattgtctcatgagcggatacatatttgaatgtatttagaaaaataaacaaataggggttccgcgcacatttccccgaaaagtgccacctgacgtctaagaaaccattattatcatgacattaacctataaaaataggcgtatcacgaggccctttcgtc

SEQ ID NO: 333 - DNA, 3141 bp, Artificial Sequence
  Plasmid pSL0196
tcgcgcgtttcggtgatgacggtgaaaacctctgacacatgcagctcccggagacggtcacagcttgtctgtaagcggatgccgggagcagacaagcccgtcagggcgcgtcagcgggtgttggcgggtgtcggggctggcttaactatgcggcatcagagcagattgtactgagagtgcaccatatgcggtgtgaaataccgcacagatgcgtaaggagaaaataccgcatcaggcgccattcgccattcaggctgcgcaactgttgggaagggcgatcggtgcgggcctcttcgctattacgccagctggcgaaagggggatgtgctgcaaggcgattaagttgggtaacgccagggttttcccagtcacgacgttgtaaaacgacggccagtgaattgacgcgtattgggatacacttgctttaagatttgtaatggctagattgaaaacagttaaaagtattttcgtaaatatttttctctttctggataatgggctatttcaacccacagcagtgcaacatctgtcagtacttctggtgcctttattttatgggggcagctgtcagatgtgcgattaaaaaaagtggagtttcatcatgtttaatgaagtccatagtagctagcctcaataagcttcttgcctttctgcagaccaaggacccagattatgtttcatgggcaaacgataatctcaggcggtaaggccatgaaacgctatctgacctggattgtagcagcagagttactgttcgctaccggaaacctgcatgccaatgaagttgaagtcgaggttcccggattgttaaccgaccagaccgtctcttcgataggacatgaattctatcgtgcattcagcgacaaatgggaaagcgaatacaccatcccaatggcgcgccgagcttggcgtaatcatggtcatagctgtttcctgtgtgaaattgttatccgctcacaattccacacaacatacgagccggaagcataaagtgtaaagcctggggtgcctaatgagtgagctaactcacattaattgcgttgcgctcactgcccgctttccagtcgggaaacctgtcgtgccagctgcattaatgaatcggccaacgcgcggggagaggcggtttgcgtattgggcgctcttccgcttcctcgctcactgactcgctgcgctcggtcgttcggctgcggcgagcggtatcagctcactcaaaggcggtaatacggttatccacagaatcaggggataacgcaggaaagaacatgtgagcaaaaggccagcaaaaggccaggaaccgtaaaaaggccgcgttgctggcgtttttccataggctccgcccccctgacgagcatcacaaaaatcgacgctcaagtcagaggtggcgaaacccgacaggactataaagataccaggcgtttccccctggaagctccctcgtgcgctctcctgttccgaccctgccgcttaccggatacctgtccgcctttctcccttcgggaagcgtggcgctttctcatagctcacgctgtaggtatctcagttcggtgtaggtcgttcgctccaagctgggctgtgtgcacgaaccccccgttcagcccgaccgctgcgccttatccggtaactatcgtcttgagtccaacccggtaagacacgacttatcgccactggcagcagccactggtaacaggattagcagagcgaggtatgtaggcggtgctacagagttcttgaagtggtggcctaactacggctacactagaagaacagtatttggtatctgcgctctgctgaagccagttaccttcggaaaaagagttggtagctcttgatccggcaaacaaaccaccgctggtagcggtggtttttttgtttgcaagcagcagattacgcgcagaaaaaaaggatctcaagaagatcctttgatcttttctacggggtctgacgctcagtggaacgaaaactcacgttaagggattttggtcatgagattatcaaaaaggatcttcacctagatccttttaaattaaaaatgaagttttaaatcaatctaaagtatatatgagtaaacttggtctgacagttaccaatgcttaatcagtgaggcacctatctcagcgatctgtctatttcgttcatccatagttgcctgactccccgtcgtgtagataactacgatacgggagggcttaccatctggccccagtgctgcaatgataccgcgagacccacgctcaccggctccagatttatcagcaataaaccagccagccggaagggccgagcgcagaagtggtcctgcaactttatccgcctccatccagtctattaattgttgccgggaagctagagtaagtagttcgccagttaatagtttgcgcaacgttgttgccattgctacaggcatcgtggtgtcacgctcgtcgtttggtatggcttcattcagctccggttcccaacgatcaaggcgagttacatgatcccccatgttgtgcaaaaaagcggttagctccttcggtcctccgatcgttgtcagaagtaagttggccgcagtgttatcactcatggttatggcagcactgcataattctcttactgtcatgccatccgtaagatgcttttctgtgactggtgagtactcaaccaagtcattctgagaatagtgtatgcggcgaccgagttgctcttgcccggcgtcaatacgggataataccgcgccacatagcagaactttaaaagtgctcatcattggaaaacgttcttcggggcgaaaactctcaaggatcttaccgctgttgagatccagttcgatgtaacccactcgtgcacccaactgatcttcagcatcttttactttcaccagcgtttctgggtgagcaaaaacaggaaggcaaaatgccgcaaaaaagggaataagggcgacacggaaatgttgaatactcatactcttcctttttcaatattattgaagcatttatcagggttattgtctcatgagcggatacatatttgaatgtatttagaaaaataaacaaataggggttccgcgcacatttccccgaaaagtgccacctgacgtctaagaaaccattattatcatgacattaacctataaaaataggcgtatcacgaggccctttcgtc

SEQ ID NO: 334 - DNA, 1217 bp, Salmonella typhimurium
  ansB (L-asparaginase II)
tggcgcagatcgtatctgcgcctttttattctgttttttcctgcattttgttatccatctctaaaaaatactctctgtcggatatatatcgctggttaatcgtatggcgtcacattattcgtctgcaatatagagataatgcgaccagttgacataactggagatataacatggagtttttcaggaaaacggcattagctgctctggtaatgggtttcagcggcgcagcgttcgctttaccgaatatcaccatcttagcgaccggcggaacgatcgctggcggtggtgattcagcaacaaaatcaaattatacggcaggtaaagtcggcgtcgaaaatctggtggatgccgttcctcaattgaaggacattgcggtagtgaaaggcgagcaggtcgttaacattggctcgcaggatatgaacgatgaagtctggctcacgctggcgaaaaaaatcaataccgagtgcgacagcaccgacggtttcgtgatcacccacggtactgatacgatggaagagaccgcttatttcctcgatctgaccgtgaaatgcaataaaccggtggtactggtcggcgcgatgcgtccttccacgtcaatgagcgcagatggcccgttcaacctctataatgcggtagtaacagcggctgataaacagtctgccaaccgcggcgtgctggtggtaatgaatgataccgtcatggacggacgcgacgtcactaagaccaatacgactgacgtggcgacgtttaaagcggttaactacggcccgctgggttatatccacaacggtaaaattgactaccagcgtacgccagagcgtaaacataccacctccaccccgttcgacgtgtcgaagctgaccgcgttgccgaaagtcggtatcgtttataactatgcgaatgcgtccgatctgccggcaaaagcgctggtagacgcgggttatgacgggatcgtgagcgcaggagtgggtaacggcaacctgtataaaacggtctttgataccctggcgaccgccgcgcacaacggtacggtagtggtgcgttcttcacgagtgccgactggcgcaaccacgcaggatgcggaagttgacgatgcaaaatacggctttgtcgcttccggcacgctgaacccgcaaaaagcgcgtgtcttactgcaactggcgttaacccagactaaagatccaaaacagatccagacgatgttcaatcagtattaa

SEQ ID NO: 335 - DNA, 664 bp, Salmonella typhimurium
  csgD
gtggagtttcatcatgtttaatgaagtccatagtagtcatggtcacacactattgttgatcacaaagccatctctgcaagctacggcattattgcaacatttaaagcaatcgctggccataaccggaaaactgcataatattcaacgttctctggaagatatctcggccggttgcattgttttaatggatatgatggaagcggataagaagcttatccactattggcaggataatttaagccgcaaaaacaataatataaaaacattattgttaaatacccctgacgattatccctaccgtgaaattgaaaactggcctcatattaacggcgtgttttacgctactgaagaccaggaacacgtggtcagcggattacagggtattctgcgtggcgaatgctatttttcacaaaaattagccagttacctgattacgcactcaggaaattaccgctacaacagcaccgagtccgcattactcactcatcgcgaaaaagagatcctcaataagttacgtattggtgcctctaataatgaaatcgcgaggtcgctatttatcagcgagaatacggttaagacacatctttataatcttttcaaaaagatagctgtcaaaaatcgcacccaggcagtttcatgggcaaacgataatctcaggcggtaa

SEQ ID NO: 336 - DNA, 558 bp, Salmonella typhimurium
  rck (resistance to complement killing)
atgaaaaaaatcgttctgtcctcactgctgctgtccgcagccgggctggctgccgtaccggtggcacaggctgacacccattccgtgtcggtgggatatgcccagagccggatagagcattttaaggatatccgtggggtgaacctgaaataccgctatgaggctcagacgccgctgggactgatggcgtcgttcagttggcagtcaggtaagcgcggagagtccggtggcattcctggcggaatgagctggcgtgatgatgtgaaggcgacgtactggtcgctgatggcgggtccggctgtccgtgtgaacgagctggtatctctgtatgcactggccggtgccggtaccggcagggctgaagtgaaagagcgtatcagcatgccgggatacaacgggcggttcacgggttcggagcgcagaacggggtttgcctggggagccggcgtacagtttaatccggtggaaaatgtggtcatcgatctgggctatgagggaagtaaagttggcgcagcgaaactgaacggcgttaacgttggtgtcggttaccggttctga

SEQ ID NO: 337 - DNA, 4369 bp, Salmonella typhimurium
  pagP
gaattccagcacggcggccagcagcatacagatcaccagaatggtaataatgtgcaactgcggcccccatttaccgtcaaaaatcagtacgccgataatgggcgtgaacggcaaaagggcataaaacgccggggccgtggtggtaatctccgccacgtccagcatctcatgtgaaatgttctcttttttatccagatagcgttgccagaaaaagtgcgcaatcgccataccgataatggcggcgatggaaattggcagcgtagttttgaacgcgaaatcgattaacggcatctccgccgcttttgcggctaaaaccacatcgccagacgttggcgagaggatgatggcggccggagaggcgcaaatagccgccgccgcgccgcggctaatgccgacgttgaccatcaccgggaagagagtagccatgagcagtacgccaagccccgtcgcggaagagacggccagcgacatcaggcaggcgacaaaataggcggcaatcatcaacaggtagggcgagtttatgtactgtaaaggtttcgacgccagcttcacgaccatatcattcgcgccgatatgcgtcatataggcggcaaagccgcacagcatcatgatcatcatgccaagatcgccgccgcgactcataagcaaaattttgatgtattcaacaatatctgttgcggtatagccggtactggtttcgctggcaggtaataccttatgccccatcagcgcgctgataataagcagagccagaccgccgacaaataaaacgccagtggcggaatatcccttaatgatgtagcgcgctacacccacaataacgacgattccgataaggacctctataactgttagcattgtttcccctgtcttatcgacacccagagtaaaaataagaaccacaaaagtggtataaaaatgtaccgaataaaggatggcgccttactgattaaaatcacggcgcggttattttttcatgtcattgctaaagatgaaatatacttatacgaattttctgtagcactataagtattaatttattgttattttattgttttatttgttgtgctttgttttgtgttttttgtgaaagcttattaaggagcgcgtgacggttctgagtgctaaatcaaacgccgttaacccgatactctctcagattattctctgtttatagtttgttaagattttattcaggttaatgttgttattatcacagtcgaatttttgaacggtatgtatgttgcgatgatcatcagaaagtattttcttattattgctctccttttgatgccatggctggctattccttcagtctctgcggcggataaaggggggtttaacacgtttaccgataacgtcgcagaaacgtggcgacagcctgagcattatgatttgtatgtccccgccattacctggcatgcgcgctttgcctacgataaagagaaaacggatcgctataacgagcggccgtggggcgttggttttggtcagtcccgctgggacgacaaaggcaactggcatggcctctatatgatggcctttaaagattcatttaacaaatgggaacccataggcggttatggctgggaaaaaacctggcgaccgctggaagacgataattttcgccttggactgggctttaccgcaggcgttaccgcgcgcgacaactggaattatattcccatccctgtgctgttgcctttagcgtcgataggctatggtcccgctacctttcagatgacctacattccgggttcgtataacaacggaaacgtctatttcgcctggatgcgtttccagttttgatggggaagggtatgcttcagttgtgaattaaaaagtcttaaaaaacaataagtagatagagttagctaaaaattaacgcgatatttatcactttttcgcaaagttcgactggacaaaatgcatcacaattgttgtactggtatccgacacagcatttgtgtctatttttcatgtaaaggtaattttgatgtctaagattaaaggtaacgttaagtggtttaatgaatccaaaggattcggtttcattactccggaagatggcagcaaagacgtgtttgtacacttctctgcaatccagaccaatggttttaaaactctggctgaaggtcagcgcgtagagttcgaaatcactaacggtgccaaaggcccttccgctgcaaacgtaactgctctgtaagcatacgtccgacagcaagatttcaaaacccgccctttcggcgggttttttttgcgcttaacgcgccgctgcggcggaaaatagccagaatgccagcgccgtcatggcaaacgaacctaacaggttaatcagcacattcagcagcgcccagccaaagcgcccctcttgcagcaagaataccacttcggcagaaaaagtagaaaaggtcgtcaggccgccgcaaaagccggttgtgatgagcactttccacatcggatcgatatgtgtcatgcggttaaaccaggcgaaccccatgccgataataaacgcgccaagcaaatttgctgttagcgtaccgatgggaatcgcctgatgaagcggattaaaacgcatactgagcatccaccgggctacgctccccgttccaccgccgataaaaactgctaaaagaagctgtaacactgccgaatcctttatttaattgctatacaagaggagtgtaacgccgaacacgcataattggcgagtcctgacagaggtgtgggaggggatatgttcgttgcagccgggcagtttgtggtgagttctgtatgggaagagaatgcgcaagtttgcgtttcgttaatggctcaggcggcgggccgcggcgtatcgcttctggtgttgcctgaggggatattagcgcgagatgacatcgaccttgacctgccgattcgcgccgcgcagccgctggatggcgcgtttatgacgcggcttctggaagaaagcgctcataataatatgacgacgatattcactatccttgtcccgtcaacgcctggacgggcggttaatatgctggtggcgctacgggcgggtcacattgtcgcgcgttacgcgaagctgcatctctatgatgcgttttcgatgcaagaatcccaaagtattgatgccggaaccgttatcgcgcctgtgctggacgtggagggggttaaggtggggcttatgacctgttatgacctgcgctttccggacatggcgctagcgctggctttacagggggctgacgtattggcgctgccgacgggctgggttcgcggcccgttgaaagagcagcagtggtcgacgctgctggcggcgagagcgctggataccaccagctatatgattgcggccggggagtgtggtaatcgtaatattggtcaaagtcgtattatcgatccgttgggggtaacgatagccgcggcagccgatcgtccggcgctgatcgtcgcggaaatattcagagaacgaatagaccaggtgcgggagcaacttcctcttttgcagcaacgacgatttgcgccaccgcaattattatgatgtttttttacgcaaagcttgattcaccttgttacagattgctattgtgtgcgcgcgtcgaaagaccgttaatattctcaggttaatccggcgcgttacgcagcctgtttttagtgaagaaggtatctatgggtgagattagtattaccaaactgctggtggttgccgcactggttgttctgctgtttggtaccaagaagttacgtacgctgggcggagacctgggcacggcgattaaaggattcaagaaagcaatgaacgatgaagacgcgggcgttaagaaagacgtcgacggtagcgttcaggctgaaaaactctcgcacaaagagtaattgcgcgatgcgcttgctccgcagagtaaaaaaaccggcgagttgccggttttttttgcctgaaatgtaagcgtctattacacgatcatttcacttccatgcctttggcctggagatcagcatggtacgaagaacgtacaaaggggccacaggcggcatgggtaaagcccatcgccagggcttccgctttcatctcgtcaaactcttccgggctgacataacgctgtaccggcaggtgatggcggcttggctgtagatactgaccaagcgtcagcatggtaacgccgtgacggcgtaagtcgcgcataacctcaatgatttccgcattggtttcgcctaagcccaccatcagacccgattttgtcggaatttccgggtgcgcttctttgaagcgttccagtaatttcagcgaccagttgtaatcggcgcccggacgaacctggcggtaaatacgcggcacgttttccaggttgtggttaaacacatccggcggcgtcgcgttaaggatatc

SEQ ID NO: 338 - DNA, 1500 bp, Salmonella typhimurium
  fliC
aaggaaaagatcatggcacaagtcattaatacaaacagcctgtcgctgttgacccagaataacctgaacaaatcccagtccgctctgggcaccgctatcgagcgtctgtcttccggtctgcgtatcaacagcgcgaaagacgatgcggcaggtcaggcgattgctaaccgttttaccgcgaacatcaaaggtctgactcaggcttcccgtaacgctaacgacggtatctccattgcgcagaccactgaaggcgcgctgaacgaaatcaacaacaacctgcagcgtgtgcgtgaactggcggttcagtctgctaacagcaccaactcccagtctgacctcgactccatccaggctgaaatcacccagcgcctgaacgaaatcgaccgtgtatccggccagactcagttcaacggcgtgaaagtcctggcgcaggacaacaccctgaccatccaggttggtgccaacgacggtgaaactatcgatatcgatctgaagcagatcaactctcagaccctgggtctggatacgctgaatgtgcaacaaaaatataaggtcagcgatacggctgcaactgttacaggatatgccgatactacgattgctttagacaatagtacttttaaagcctcggctactggtcttggtggtactgaccagaaaattgatggcgatttaaaatttgatgatacgactggaaaatattacgccaaagttaccgttacggggggaactggtaaagatggctattatgaagtttccgttgataagacgaacggtgaggtgactcttgctggcggtgcgacttccccgcttacaggtggactacctgcgacagcaactgaggatgtgaaaaatgtacaagttgcaaatgctgatttgacagaggctaaagccgcattgacagcagcaggtgttaccggcacagcatctgttgttaagatgtcttatactgataataacggtaaaactattgatggtggtttagcagttaaggtaggcgatgattactattctgcaactcaaaataaagatggttccataagtattaatactacgaaatacactgcagatgacggtacatccaaaactgcactaaacaaactgggtggcgcagacggcaaaaccgaagttgtttctattggtggtaaaacttacgctgcaagtaaagccgaaggtcacaactttaaagcacagcctgatctggcggaagcggctgctacaaccaccgaaaacccgctgcagaaaattgatgctgctttggcacaggttgacacgttacgttctgacctgggtgcggtacagaaccgtttcaactccgctattaccaacctgggcaacaccgtaaacaacctgacttctgcccgtagccgtatcgaagattccgactacgcgaccgaagtttccaacatgtctcgcgcgcagattctgcagcaggccggtacctccgttctggcgcaggcgaaccaggttccgcaaaacgtcctctctttactgcgttaa

SEQ ID NO: 339 - DNA, 1528 bp, Salmonella typhimurium
  fljB
aaattttatggcacaagtaatcaacactaacagtctgtcgctgctgacccagaataacctgaacaaatcccagtccgcactgggcaccgctatcgagcgtctgtcttctggtctgcgtatcaacagcgcgaaagacgatgcggcaggtcaggcgattgctaaccgtttcaccgcgaacatcaaaggtctgactcaggcttcccgtaacgctaacgacggtatctccattgcgcagaccactgaaggcgcgctgaacgaaatcaacaacaacctgcagcgtgtgcgtgaactggcggttcagtctgctaacagcaccaactcccagtctgacctcgactccatccaggctgaaatcacccagcgcctgaacgaaatcgaccgtgtatccggccagactcagttcaacggcgtgaaagtcctggcgcaggacaacaccctgaccatccaggttggcgccaacgacggtgaaactatcgatatcgatctgaagcagatcaactctcagaccctgggtctggactcactgaacgtgcagaaagcgtatgatgtgaaagatacagcagtaacaacgaaagcttatgccaataatggtactacactggatgtatcgggtcttgatgatgcagctattaaagcggctacgggtggtacgaatggtacggcttctgtaaccggtggtgcggttaaatttgacgcagataataacaagtactttgttactattggtggctttactggtgctgatgccgccaaaaatggcgattatgaagttaacgttgctactgacggtacagtaacccttgcggctggcgcaactaaaaccacaatgcctgctggtgcgacaactaaaacagaagtacaggagttaaaagatacaccggcagttgtttcagcagatgctaaaaatgccttaattgctggcggcgttgacgctaccgatgctaatggcgctgagttggtcaaaatgtcttataccgataaaaatggtaagacaattgaaggcggttatgcgcttaaagctggcgataagtattacgccgcagattacgatgaagcgacaggagcaattaaagctaaaactacaagttatactgctgctgacggcactaccaaaacagcggctaaccaactgggtggcgtagacggtaaaaccgaagtcgttactatcgacggtaaaacctacaatgccagcaaagccgctggtcatgatttcaaagcacaaccagagctggcggaagcagccgctaaaaccaccgaaaacccgctgcagaaaattgatgccgcgctggcgcaggtggatgcgctgcgctctgatctgggtgcggtacaaaaccgtttcaactctgctatcaccaacctgggcaataccgtaaacaatctgtctgaagcgcgtagccgtatcgaagattccgactacgcgaccgaagtttccaacatgtctcgcgcgcagattctgcagcaggccggtacttccgttctggcgcaggctaaccaggtcccgcagaacgtgctgtctctgttacgttaa

SEQ ID NO: 340 - DNA, 537 bp, Yersinia enterocolitica
  ail (attachment invasion locus)
atgaaaaagacattactagctagttctctaatagcctgtttatcaattgcgtctgttaatgtgtacgctgcgagtgaaagtagtatttctattggttatgcgcaaagccatgtaaaagaaaatggggatacattggataatgaccctaaaggttttaacctgaagtaccgttatgaactcgatgataactggggagtaataggttcgtttgcttatactcatcagggatatgatttcttctatggcagtaataagtttggtcatggtgatgttgattactattcagtaacaatggggccatctttccgcatcaacgaatatgttagcctttatggattactgggggccgctcatggaaaggttaaggcatctgtatttgatgaatcaatcagtgcaagtaagacgtcaatggcatacggggcaggggtgcaattcaacccacttccaaattttgtcattgacgcttcatatgaatactccaaactcgatagcacaaaagttggcacctggatgcttggtgcagggtatcgattctaa

SEQ ID NO: 341 - DNA, 1286 bp, Salmonella typhimurium
  pgtE (outer membrane serine protease)
tgattatagattgcttattattcacctgagcatcaaattctatttcttaacttcaatataaggtaaaaatgcgtcaagttctctggcgtaataaatgtactcttgtccgacgatttgacaagatgaaaacttcatcacctctccagattacatctgaatatgaggacaagagaaatgaaaaaacatgctattgcagtaatgatgatcgccgtattttctgagtcggtttatgcggagtctgccttatttattccggacgtctctcctgatagcgtcacgacatccctttccgtgggtgtgttaaatggtaaatccagggagctggtttatgataccgacaccgggcggaagctgagtcaactggattggaaaataaaaaatgtcgccacgttgcagggggatttatcatgggaaccctattcgttcatgacgctggacgcccgcggctggacgtctttggcgtcgggatcgggtcatatggttgaccatgactggatgagcagtgagcagccaggctggaccgatcgttcaattcatccggacaccagcgtcaactatgctaatgaatacgatttgaacgtgaaaggttggttattgcagggcgataactacaaggcgggcgtaacagcgggctatcaggaaacccgttttagctggacggcaagaggcgggtcttatatttatgataatggtcgatatattggtaattttcctcatggcgtgcgcggcataggttatagccagcgtttcgaaatgccctatatcgggctggcgggtgattatcgtattaatgactttgagtgtaatgtactgtttaaatacagcgactgggtaaatgcgcatgataatgacgaacactacatgcgcaaacttaccttccgtgaaaaaacggaaaattcacgatattatggcgcttctattgacgccggatattatattaccagtaatgcaaaaatctttgctgagtttgcttacagtaaatatgaagaaggtaagggcggtacgcaaatcatagataaaaccagcggtgatacggcgtattttggtggcgatgccgcaggtatagctaataataactatacggttaccgcggggttgcagtatcgcttctagaccacatcgggatgtcatcggtcataaccggccgatgacgactttttgctgaacgtatggcatgtccggtgatattgcataggggcaataaaagcaacatgaaagggaaaccgctcgaaaggttatgcagcaagaagagaatgtcctgggtatcaatggtgtcccctgcagta

SEQ ID NO: 342 - protein, 254 aa, Homo sapiens
  4-1BBL
MEYASDASLDPEAPWPPAPRARACRVLPWALVAGLLLLLLLAAACAVFLACPWAVSGARASPGSAASPRLREGPELSPDDPAGLLDLRQGMFAQLVAQNVLLIDGPLSWYSDPGLAGVSLTGGLSYKEDTKELVVAKAGVYYVFFQLELRRVVAGEGSGSVSLALHLQPLRSAAGAAALALTVDLPPASSEARNSAFGFQGRLLHLSAGQRLGVHLHTEARARHAWQLTQGATVLGLFRVTPEIPAGLPSPRSE

SEQ ID NO: 343 - DNA, 4899 bp, Homo sapiens
  4-1BBL
agtctctcgtcatggaatacgcctctgacgcttcactggaccccgaagccccgtggcctcccgcgccccgcgctcgcgcctgccgcgtactgccttgggccctggtcgcggggctgctgctgctgctgctgctcgctgccgcctgcgccgtcttcctcgcctgcccctgggccgtgtccggggctcgcgcctcgcccggctccgcggccagcccgagactccgcgagggtcccgagctttcgcccgacgatcccgccggcctcttggacctgcggcaggtgagacgtgccccgaccctcggtagctggtctcgcgggagacccctaccgcccctctgggactcccttctccctcccgcacccccagggacacctgttctacactcccggccggggagaggagacccaccggggctcccattctccatctagcaccgaggccgggggggcacacctttcatcccgcacccctacgacacctcatctgtaccccaggccgggggcggggaggagaccgcccaacagttctttttggaccccccaagggtctccttcttctagtccggggggcacccctttcatcctgcgcccgctacgagaccctatctgtatcccgggagggggagaggagacccccacaagttctttttggacctccaagggctctccttctccgtcttgcacgggagggcacccctttcattccgcatcccgagaccccatcagcaccccaggccaggaggaggagacccccacagtcctcaacccctcagggatacgtcttctgcaccccgggtcggagaaaggctggcttccctccatgtggcagtgggtgggggcacccctcttcattccgcattcccaaggcaccccatctgcaccctggacgggggaccctccgcggttctccaaccctcgacggcttcctttctctatgtaggacttaggacattgagggcacctctttttaccccgcacccccacaagctctgcatctctggggggaaccttttttccatccccgatccgaggggggcacttcctctttatctgggaccgccaaggagacccccagttcctttgctaactcccaaagagccttatccccaacatctgaggtacccctctccctttcaagacccccaggggaatacccccaagggggctggaaagaagagggatcgcttttccctcctgaattcttggagatctgtccttggggcaggttgagccaccagcttcgtgtgtgtgtgtgtgtgtgtgtgtgtgtgtgttcgtgtttgtgtgggtgtttgtgttcgtgtgtgtgtgttcgtgtgggggtgcgtatgtgtgtgtgttcgtgggtgtgtttgtgttcgtgtgggtgtgtgttcgtgtgggtgtttgtgtttgttcgttcgtgtgggtgtttgtgttcatgtgggtgtgtttggatatttgtgttcgtgtgtgtctgtgtgtgttcgtgtgggtgtttgtgtgtgtttgtgtttgcgttcgtgtgtgtgttcgtgtttgttcgtgtgtctgtgtgttaatgtgggtgttcgtgtgtgtgttcgtttgtgtttgtgttcgtgtgtttgtgtgtttgtgtgtgtgtgtgtgcggtctctgttctttagttgggagggaagggaagcgtaggcttcaggtcggcacagactctggggaccctgacagctgaagtgagtggggacagaacctccattttctaggggaacccccatccactttcctcctttctacttttaacagggcatgtttgcgcagctggtggcccaaaatggtaagtatcctccgccacttccggtccctggccccccaccatccccaccccgggatacgaagaagggggaacctggagagtgaggctctgccgcacactggctttgacccttgaccgctgctgtctctgaaagctgctacttcccctctttgaacgccaccgatccctctttctgacttgctctgactctctggatgccatggcctccccatcagacccccatctgggcccacctgggacccctgccctctcagagctggggcttgacacccccaacccccagcctggttttgtgtctctggcctccttcttttcgaaaccctcttccccgctgcttttcttccctctttcctgccccttccccactctcccagcctctcttccctacctcttcccctcgcccagagcctcctccttactcccattctcttccccatccccaggccctcctcctgtccccttccctccccctagaccctcctccctgccccttccccaaaccctccccagccccatgctctcccagtttccaagacactcctcccagcaccttccctccccgtccagagacttcttccccgctcgagacctcttcccccttcccctcccagagacccccttcccccttcccctctccatctagagatcacttccccctttcccctccccctccagaaaccccttcccccttccctctcccctccagagaccccttccccctccaaagaccccttcccccttccttccccctccagagacccctttccccttccctccccttccagagaccccttccccctccccctccaaagaccccttcctccttcccctccctctccagagaccccttcccccttccctctccctccagagaccccttcccccttccctgccccctccagagtccccttcccctccagaggccccttcccccttccccctccccctccagagacaccttctcccttctccccctccagagaccccttcccccttccctccccctgcctaagactcccctccctgccatcttctctccttggtgcttccttctccctaacccctcccccaccccttcctgctccctttgcctttcttcgaagtcctctcttaccaggtcccctgtccacccctcttaaagttcccttgattccctgatggatccttcctctagaacttcctcctttcctaacagtcttccctctccctcctagctccctgtccacctctcctctcccctttccttccttctctcccttctcctccccccatctccatcctgtccgagatctgctgctccctccaaccccctcaccgccctctccaggagtccccttacccctccccgaggcctcttccagccagactcgcctggccttttgcttttcaccccctcttcctcttcctgcatgtctttccccgcacccgcatcactccttccccacccaacctcttggagttttgccctgtcccgactcttgtccttctccctggattcccttcctctgttctatccccgtctttccctcccctagctctacccctgctcagagtcccgcccccaacaacctcagttctcttcaatcagcacccccccaacgccccccccacccaggctccccgctctgctcccctgtcccgctccctgccccgccattccccgccccccggcccctgacccgttcttttctcccagggctgcgctgacatgttcggtgctcagccacgctcagctgtgctgggacatgctcagctaagctaagtgcatgctttcctcccacagttctgctgatcgatgggcccctgagctggtacagtgacccaggcctggcaggcgtgtccctgacggggggcctgagctacaaagaggacacgaaggagctggtggtggccaaggctggagtctactatgtcttctttcaactagagctgcggcgcgtggtggccggcgagggctcaggctccgtttcacttgcgctgcacctgcagccactgcgctctgctgctggggccgccgccctggctttgaccgtggacctgccacccgcctcctccgaggctcggaactcggccttcggtttccagggccgcttgctgcacctgagtgccggccagcgcctgggcgtccatcttcacactgaggccagggcacgccatgcctggcagcttacccagggcgccacagtcttgggactcttccgggtgacccccgaaatcccagccggactcccttcaccgaggtcggaataacgtccagcctgggtgcagcccacctggacagagtccgaatcctactccatccttcatggagacccctggtgctgggtccctgctgctttctctacctcaaggggcttggcaggggtccctgctgctgacctccccttgaggaccctcctcacccactccttccccaagttggaccttgatatttattctgagcctgagctcagataatatattatatatattatatatatatatatatttctatttaaagaggatcctgagtttgtgaatggacttttttagaggagttgttttgggggggggggggtcttcgacattgccgaggctggtcttgaactcctggacttagacgatcctcctgcctcagcctcccaagcaactgggattcatcctttctattaattcattgtacttatttgcttatttgtgtgtattgagcatctgtaatgtgccagcattgtgcccaggctagggggctatagaaacatctagaaatagactgaaagaaaatctgagttatggtaatacgtgaggaatttaaagactcatccccagcctccacctcctgtgtgatacttgggggctagcttttttctttctttcttttttttgagatggtcttgttctgtcaaccaggctagaatgcagcggtgcaatcatgagtcaatgcagcctccagcctcgacctcccgaggctcaggtgatcctcccatctcagcctctcgagtagctgggaccacagttgtgtgccaccacacttggctaactttttaatttttttgcggagacggtattgctatgttgccaaggttgtttacatgccagtacaatttataataaacactcatttttcctccc

SEQ ID NO: 344 - protein, 309 aa, Mus musculus
  4-1BBL
MDQHTLDVEDTADARHPAGTSCPSDAALLRDTGLLADAALLSDTVRPTNAALPTDAAYPAVNVRDREAAWPPALNFCSRHPKLYGLVALVLLLLIAACVPIFTRTEPRPALTITTSPNLGTRENNADQVTPVSHIGCPNTTQQGSPVFAKLLAKNQASLCNTTLNWHSQDGAGSSYLSQGLRYEEDKKELVVDSPGLYYVFLELKLSPTFTNTGHKVQGWVSLVLQAKPQVDDFDNLALTVELFPCSMENKLVDRSWSQLLLLKAGHRLSVGLRAYLHGAQDAYRDWELSYPNTTSFGLFLVKPDNPWE

SEQ ID NO: 345 - DNA, 2472 bp, Mus musculus
  4-1BBL
gagaaagttccgggagtcgaggggcggagcgcggagcccgggaaccccgcggctgccctccctcccttccctccccggaaaaggcgcctcggtagcctataaagcacgggcactggcgggagacgtgcactgaccgaccgtggtaatggaccagcacacacttgatgtggaggataccgcggatgccagacatccagcaggtacttcgtgcccctcggatgcggcgctcctcagagataccgggctcctcgcggacgctgcgctcctctcagatactgtgcgccccacaaatgccgcgctccccacggatgctgcctaccctgcggttaatgttcgggatcgcgaggccgcgtggccgcctgcactgaacttctgttcccgccacccaaagctctatggcctagtcgctttggttttgctgcttctgatcgccgcctgtgttcctatcttcacccgcaccgagcctcggccagcgctcacaatcaccacctcgcccaacctgggtacccgagagaataatgcagaccaggtcacccctgtttcccacattggctgccccaacactacacaacaggtgaggctcatctcatccctaggggactctttcttaccttctggaagcatcgctgcaccgacagggagagaacagcacttcctccccacccccgccccgccccgccccgccccgcctcgctctgctcctgctactccgcttgaagcaccccctctccatctcgcactcagaggaaatccctttgcgtcttgaccccttgaatgaacctatgaaacctgggggagaactcccgagggtgcaccgcagttcccttcagtcccacttaggccttcagggctctccttctccatccaaagttggacgccccaatgtgtgctgggccgtatgagttcctatctgcttctttaggatgtaaggtaccatctacctttatttttctttcttcccagggctctcctgtgttcgccaagctactggctaaaaaccgtgagtgccccctgatttatttccagcgggtcccgcagggaggttgaacaaggggacctgttcaaccttctagtcatgtccctctccctcacttactcagcctttctcacttgctgtcacagctccaactgtcatccttgggaccccatccaggttttcagagaattgagaattctcacccccagctgactctgggagatctccttttctcttttccttcctctatccctcccatgtagcccaggcttcctccaaattcattatgtagctgaggctggccgccctgctgccaacacctccaatgggctgggataaatgaatgcctttgggcttcaggcaccctattgagcccgagccctagtctctccctgtcaagtcttagttgtcaaattatttgccctcagagatgactctcttcctgcactctccatatcccacctctctcccagttttgttcatccctctcttactcctctgatttctctctcttcttttctcctctcccccttcccctcttgtggcccctttactcagctccttccaggagtccatgtgcatctccgctcttaacactctagaccctcgcccctttgcctcgttcttattccacaaccactttcttaaattgtatcccttctgggtggcccctccctccttttcttctgttttgtctcctctctttcctccccattcccatggtttcccccctcccccacaccccgcaaccctcagcaactcagtgttctttttctagaagcatcgttgtgcaatacaactctgaactggcacagccaagatggagctgggagctcatacctatctcaaggtctgaggtacgaagaagacaaaaaggagttggtggtagacagtcccgggctctactacgtatttttggaactgaagctcagtccaacattcacaaacacaggccacaaggtgcagggctgggtctctcttgttttgcaagcaaagcctcaggtagatgactttgacaacttggccctgacagtggaactgttcccttgctccatggagaacaagttagtggaccgttcctggagtcaactgttgctcctgaaggctggccaccgcctcagtgtgggtctgagggcttatctgcatggagcccaggatgcatacagagactgggagctgtcttatcccaacaccaccagctttggactctttcttgtgaaacccgacaacccatgggaatgagaactatccttcttgtgactcctagttgctaagtcctcaagctgctatgttttatggggtctgagcaggggtcccttccatgactttctcttgtctttaactggacttggtatttattctgagcatagctcagacaagactttatataattcactagatagcattagtaaactgctgggcagctgctagataaaaaaaaatttctaaatcaaagtttatatttatattaatatataaaaataaatgtgtttgta

SEQ ID NO: 346 - DNA, 589 bp, Artificial Sequence
  Woodchuck Hepatitis Virus Posttranscriptional Regulatory Element (WPRE)
aatcaacctctggattacaaaatttgtgaaagattgactggtattcttaactatgttgctccttttacgctatgtggatacgctgctttaatgcctttgtatcatgctattgcttcccgtatggctttcattttctcctccttgtataaatcctggttgctgtctctttatgaggagttgtggcccgttgtcaggcaacgtggcgtggtgtgcactgtgtttgctgacgcaacccccactggttggggcattgccaccacctgtcagctcctttccgggactttcgctttccccctccctattgccacggcggaactcatcgccgcctgccttgcccgctgctggacaggggctcggctgttgggcactgacaattccgtggtgttgtcggggaagctgacgtcctttccatggctgctcgcctgtgttgccacctggattctgcgcgggacgtccttctgctacgtcccttcggccctcaatccagcggaccttccttcccgcggcctgctgccggctctgcggcctcttccgcgtcttcgccttcgccctcagacgagtcggatctccctttgggccgcctccccgc

SEQ ID NO: 347 - DNA, 534 bp, Artificial Sequence
  Hepatitis B Virus Posttranscriptional Regulatory Element (HPRE)
ttgctcggcaacggcctggtctgtgccaagtgtttgctgacgcaacccccactggctggggcttggccataggccatcagcgcatgcgtggaacctttgtggctcctctgccgatccatactgcggaactcctagccgcttgttttgctcgcagccggtctggggcaaagctcatcggaactgacaattctgtcgtcctctcgcggaaatatacatcgtttccatggctgctaggttgtactgccaactgcatccttcgcgggacgtcctttgtttacgtcccgtcggcgctgaatcccgcggacgacccctctcggggccgcttgggactctctcgtccccttctccgtctgccgttccagccgaccacggggcgcacctctctttacgcggtctccccgtctgtgccttctcatctgccggtccgtgtgcacttcgcttcacctctgcacgttgcatggagaccaccgtgaacgcccatcagatcctgcccaaggtcttacataagaggactcttggactcccagcaatgtc

SEQ ID NO: 348 - protein, 398 aa, Danio rerio
  WT Zebrafish STING (zfSTING)
MSVMGEDALVPRARSRLPVMCAAGLGFLTLAVAWLLDSDKFSERAGIIAFGLMLERFIYCICLLAEELLFHSRQRYHGRMSEIFRACFRGSGILGMCAIFLMLMLGGVSFSVKQWSHFNLMCAGYMLLNSLGVLGPAPVEISEICEAKKMNVAHGLAWSFYIGYLKFLLPALEVNVREYSRRERLSSPRLHILLPLNARVPSKPEEEDTNVVFHENLPDLKLDRAGVRKRSYTNSVYKITHNNETFSCILEYATPLLTLYQMSQESSAGFGERERKQQVLLFYRTLSQILDNSLECRNRYRLILLNDEHTGDPHYLSRELFQNLKQQDGEIFMDPTNEVHPVPEEGPVGNCNGALQATFHEEPMSDEPTLMFSRPQSLRSEPVETTDYFNPSSAMKQN

SEQ ID NO: 349 - protein, 381 aa, Sarcophilus harrisii
  WT Tasmanian devil STING (tazSTING)
MPRSHLHPSIPQPRGWGAQKAACVLLSLCMAAVYILGESAAFTLQWLLFYFTTVQVGLLLKGAYCLAEELYHIQSRHQGSYWQAIQACIHYPFQRISLLLLSGYFYVTLSNKPNPSLTWTFALLGLSHALSFILGLQNLTSAEISEVCEKRHLNVAHGLAWSYYIGYLKLILPGLQTRIQIYNQFNKDVLRSPEGHRLHILIPLDCSVPDNLSQADPNIQFLQELPQHKLDRAGIKGRIYTNSIYKISEDGQPAEVCVLEFATPLQTLFAMSQDARAGFSREDRLEQAKLFCRTLEDILEDAPEARDCCRLVVYQEPEDKAVSNFSLSKEILRHLRQERQEEFAIGPKRAMTVTTSSTLSQEPQLLISGMEQPLSLRTDGF

SEQ ID NO: 350 - protein, 381 aa, Artificial Sequence
  Tasmanian devil STING (tazSTING) C206Y
MPRSHLHPSIPQPRGWGAQKAACVLLSLCMAAVYILGESAAFTLQWLLFYFTTVQVGLLLKGAYCLAEELYHIQSRHQGSYWQAIQACIHYPFQRISLLLLSGYFYVTLSNKPNPSLTWTFALLGLSHALSFILGLQNLTSAEISEVCEKRHLNVAHGLAWSYYIGYLKLILPGLQTRIQIYNQFNKDVLRSPEGHRLHILIPLDYSVPDNLSQADPNIQFLQELPQHKLDRAGIKGRIYTNSIYKISEDGQPAEVCVLEFATPLQTLFAMSQDARAGFSREDRLEQAKLFCRTLEDILEDAPEARDCCRLVVYQEPEDKAVSNFSLSKEILRHLRQERQEEFAIGPKRAMTVTTSSTLSQEPQLLISGMEQPLSLRTDGF

SEQ ID NO: 351 - protein, 381 aa, Artificial Sequence
  Tasmanian devil STING (tazSTING) R284G
MPRSHLHPSIPQPRGWGAQKAACVLLSLCMAAVYILGESAAFTLQWLLFYFTTVQVGLLLKGAYCLAEELYHIQSRHQGSYWQAIQACIHYPFQRISLLLLSGYFYVTLSNKPNPSLTWTFALLGLSHALSFILGLQNLTSAEISEVCEKRHLNVAHGLAWSYYIGYLKLILPGLQTRIQIYNQFNKDVLRSPEGHRLHILIPLDCSVPDNLSQADPNIQFLQELPQHKLDRAGIKGRIYTNSIYKISEDGQPAEVCVLEFATPLQTLFAMSQDARAGFSREDGLEQAKLFCRTLEDILEDAPEARDCCRLVVYQEPEDKAVSNFSLSKEILRHLRQERQEEFAIGPKRAMTVTTSSTLSQEPQLLISGMEQPLSLRTDGF

SEQ ID NO: 352 - protein, 379 aa, Artificial Sequence
  WT human STING-tasmanian devil CTT
MPHSSLHPSIPCPRGHGAQKAALVLLSACLVTLWGLGEPPEHTLRYLVLHLASLQLGLLLNGVCSLAEELRHIHSRYRGSYWRTVRACLGCPLRRGALLLLSIYFYYSLPNAVGPPFTWMLALLGLSQALNILLGLKGLAPAEISAVCEKGNFNVAHGLAWSYYIGYLRLILPELQARIRTYNQHYNNLLRGAVSQRLYILLPLDCGVPDNLSMADPNIRFLDKLPQQTGDRAGIKDRVYSNSIYELLENGQRAGTCVLEYATPLQTLFAMSQYSQAGFSREDRLEQAKLFCRTLEDILADAPESQNNCRLIAYQEPADDSSFSLSQEVLRHLRQERQEEFAIGPKRAMTVTTSSTLSQEPQLLISGMEQPLSLRTDGF

SEQ ID NO: 353 - protein, 379 aa, Artificial Sequence
  human STING C206Y-tasmanian devil CTT
MPHSSLHPSIPCPRGHGAQKAALVLLSACLVTLWGLGEPPEHTLRYLVLHLASLQLGLLLNGVCSLAEELRHIHSRYRGSYWRTVRACLGCPLRRGALLLLSIYFYYSLPNAVGPPFTWMLALLGLSQALNILLGLKGLAPAEISAVCEKGNFNVAHGLAWSYYIGYLRLILPELQARIRTYNQHYNNLLRGAVSQRLYILLPLDYGVPDNLSMADPNIRFLDKLPQQTGDRAGIKDRVYSNSIYELLENGQRAGTCVLEYATPLQTLFAMSQYSQAGFSREDRLEQAKLFCRTLEDILADAPESQNNCRLIAYQEPADDSSFSLSQEVLRHLRQERQEEFAIGPKRAMTVTTSSTLSQEPQLLISGMEQPLSLRTDGF

SEQ ID NO: 354 - protein, 379 aa, Artificial Sequence
  human STING R284G-tasmanian devil CTT
MPHSSLHPSIPCPRGHGAQKAALVLLSACLVTLWGLGEPPEHTLRYLVLHLASLQLGLLLNGVCSLAEELRHIHSRYRGSYWRTVRACLGCPLRRGALLLLSIYFYYSLPNAVGPPFTWMLALLGLSQALNILLGLKGLAPAEISAVCEKGNFNVAHGLAWSYYIGYLRLILPELQARIRTYNQHYNNLLRGAVSQRLYILLPLDCGVPDNLSMADPNIRFLDKLPQQTGDRAGIKDRVYSNSIYELLENGQRAGTCVLEYATPLQTLFAMSQYSQAGFSREDGLEQAKLFCRTLEDILADAPESQNNCRLIAYQEPADDSSFSLSQEVLRHLRQERQEEFAIGPKRAMTVTTSSTLSQEPQLLISGMEQPLSLRTDGF

SEQ ID NO: 355 - protein, 376 aa, Artificial Sequence
  WT human STING delTRAF6 binding motif (Asp-Phe-Ser at C-terminal removed)
MPHSSLHPSIPCPRGHGAQKAALVLLSACLVTLWGLGEPPEHTLRYLVLHLASLQLGLLLNGVCSLAEELRHIHSRYRGSYWRTVRACLGCPLRRGALLLLSIYFYYSLPNAVGPPFTWMLALLGLSQALNILLGLKGLAPAEISAVCEKGNFNVAHGLAWSYYIGYLRLILPELQARIRTYNQHYNNLLRGAVSQRLYILLPLDCGVPDNLSMADPNIRFLDKLPQQTGDRAGIKDRVYSNSIYELLENGQRAGTCVLEYATPLQTLFAMSQYSQAGFSREDRLEQAKLFCRTLEDILADAPESQNNCRLIAYQEPADDSSFSLSQEVLRHLRQEEKEEVTVGSLKTSAVPSTSTMSQEPELLISGMEKPLPLRT

SEQ ID NO: 356 - protein, 377 aa, Felis catus
  WT cat STING (catSTING)
MPRTGLHPSIPRPRGMGAQKAALVLLAVCLAALWRLGESPDHTLRWLVLHLASLQLGLLFTGVCHLTEELCHLHSRYQGSYWRAMKACLGSPVRSGALLLLSCYFYSTLPSTDLPFTWMLALLGLSQALNILLDLQGLAPAEVSAVCEKKNFNVAHGLAWSYYIGYLRLILPGLPARVLTCNQLHNNILRGTGSHRLHILFPLDCGVPDDMSVADPNIRFLYELPQQSADRAGIKGRVYTNSVYALLENGQQAGICVLEYATPLQTLFAMSQDGRAGFSREDRLEQAKLFCRILEDILADTPECQNNCRLIVYQEPEEGSNFSLSQEILRHLRQEEREVTVGSVGTSMVRNPSVLSQEPNLLISGMEQPLPLRTDVF

SEQ ID NO: 357 - protein, 377 aa, Artificial Sequence
  cat STING C205Y
MPRTGLHPSIPRPRGMGAQKAALVLLAVCLAALWRLGESPDHTLRWLVLHLASLQLGLLFTGVCHLTEELCHLHSRYQGSYWRAMKACLGSPVRSGALLLLSCYFYSTLPSTDLPFTWMLALLGLSQALNILLDLQGLAPAEVSAVCEKKNFNVAHGLAWSYYIGYLRLILPGLPARVLTCNQLHNNILRGTGSHRLHILFPLDYGVPDDMSVADPNIRFLYELPQQSADRAGIKGRVYTNSVYALLENGQQAGICVLEYATPLQTLFAMSQDGRAGFSREDRLEQAKLFCRILEDILADTPECQNNCRLIVYQEPEEGSNFSLSQEILRHLRQEEREVTVGSVGTSMVRNPSVLSQEPNLLISGMEQPLPLRTDVF

SEQ ID NO: 358 - protein, 377 aa, Artificial Sequence
  cat STING R283G
MPRTGLHPSIPRPRGMGAQKAALVLLAVCLAALWRLGESPDHTLRWLVLHLASLQLGLLFTGVCHLTEELCHLHSRYQGSYWRAMKACLGSPVRSGALLLLSCYFYSTLPSTDLPFTWMLALLGLSQALNILLDLQGLAPAEVSAVCEKKNFNVAHGLAWSYYIGYLRLILPGLPARVLTCNQLHNNILRGTGSHRLHILFPLDCGVPDDMSVADPNIRFLYELPQQSADRAGIKGRVYTNSVYALLENGQQAGICVLEYATPLQTLFAMSQDGRAGFSREDGLEQAKLFCRILEDILADTPECQNNCRLIVYQEPEEGSNFSLSQEILRHLRQEEREVTVGSVGTSMVRNPSVLSQEPNLLISGMEQPLPLRTDVF

SEQ ID NO: 359 - protein, 377 aa, Callithrix jacchus
  WT Marmoset STING
MPHSSLHPSIPHPRGHGAQEAALVLLSVCLVTLWWLREAPEDILRFLVLHLASLQLGLLLNRLCSLAEELRHVHTRYQGSYWRAVRACLGCPIRLGAQLLLSIYFYCFLPNGRPFTWMLALLGFSQALNILLGLKGLAPAEISAVCEKRNFNVAHGLAWSYYIGYLRLILPGFQARIRTYNQHNNNVLRGPASQRLYILFPLDCGVPDNLSTADPNIRFLDKLPQETIDRAGIKGRVYTNSIYELLENGQRAGACVLEYASPLQTLFAMSQYGQAGFSREDRLEQAKLFCRTLEDILADAPESQNNCRLIVYEEPADGSSFLLSQEVLQHLRQEEEEEVTVGSLKTSEVPSTSTMSQEPELLISGMEKPLPLRSDLF

SEQ ID NO: 360 - protein, 378 aa, Bos taurus
  WT Cattle/Bovine STING
MPHSSLHPSIPQPRGLRAQKAALVLLSACLVALWGLGEPPDYTLKWLVLHLASQQMGLLIKGICSLAEELCHVHSRYHGSYWRAVRACLCSSMRCGALLLLSCYFYCSLPNMADLPFTWMLALLGLSQALNILLGLQGLAPAEVSAICEKRNFNVAHGLAWSYYIGYLRLILPGLPARIQIYNQFHNNTLQGAGSHRLHILFPLDCGVPDDLNVADPNIRFLHELPQQSADRAGIKGRVYTNSIYELLENGQRAGVCVLEYATPLQTLFAMSQDGRAGFSREDRLEQAKLFCRTLEDILANAPESQNNCRLIVYQEPAEGSSFSLSQEILQHLRQEEREVTMGSTETSVMPGSSVLSQEPELLISGLEKPLPLRSDVF

SEQ ID NO: 361 - protein, 375 aa, Struthio camelus australis
  WT Ostrich STING
MAHESGTPSNPATPLIPKAREGRAQHAAYVLLALCAAALYLAGEPVVHIARSFTSHFVALQIGALLKGICYLVEEIFHLETRHRGSFRRALSACLHLRWHVTLLLVCGSAYVALLDGDEQPLGLHLGLACLCQLLILALGLHKPSAVEISEMSERSKQNVAHGLAWSYYVGYLKIVLPRLKESMENIGRTNPNMLAHKETWKLHILVPLSCNICDDLEKADSNIQYAMDLPETTLTRAGTKKRVYRNTLYKIKDEDKFRFCVVEYATPLQSLYAMSQDECAAFSREDRIEQAKLFYRTLEEILQSAKECAGTYRLIVYEESGEAETHFLSREILRHLQQQRQEEYTVCDGTLCSTDLSLQISESDLPQPLRSDCL

SEQ ID NO: 362 - protein, 382 aa, Nipponia nippon
  WT Crested ibis STING
MSQEPQWLSHPTALLIPKARGGRAQHAVYLLLALCAAVLYLAGEPLVPSARSLISHFMALQIGVLLKGTCYLAEEIFHLQSRHHGSFWRALSACFPLRWHGLMLLVCGSAYVALLEDGQPLGLHLGLASLCQLLILALGLHKPSAVEMSEMSERSKQNVAHGLAWSYYVGYLKIVLPRVKKSMEEFSRANPNVLARRETWKLHILVPLSCDVYDDLEKADSNIQYLMDLPETTLTRAGTKKRVYKHSLYTIRDEGNKLWHCAVEYATPLQSLYAMSQDEYAAFSREDRLEQAKLFYRTLEEILKGSKECAGTYRLIVYEESGEAETHSLSRDILWHLRQQCHEEYTVYEGNQPHNPSTTLHSTELNLQISESDLPQPLRSDC

SEQ ID NO: 363 - protein, 380 aa, Latimeria chalumnae
  WT Coelacanth STING (UniProtKB entry H3A3G4)
FGLQNMSAIIPQPRGNRANQMAYFIITVILMLLWIFRNIMDNVLEVIALHILLLQGAAIMKGICNFAEEVNHVQPRYGGSYWKALEACLNLSKYDVMKIVFAGVLWWHFSSSLFVVWFLHLLVSCLCHLLNNVLGVLKPSPVEVSEIYERNRIGVAHGLAWSYYLGYLKLVLPELEDRIKSYNVSHGNLLKHKETWRLHILLPLSCSIFDNLADVDSNIEFLDNLSELQINRAGIKGRSYKHSLYQVLDEDKRPHYCILEYATPLKSLLEMSKEASAEFTKEDRLEQTKLFYRTLKDILDNSQECRGRFRLVIYDGREDSGKSHFLSKELLRHLNQQQKEEYFMSEQTQPNSSSTSCLSTEPQLMISDTDAPHTLKRQVC

SEQ ID NO: 364 - protein, 405 aa, Latimeria chalumnae
  WT Coelacanth STING (Isoform X1; NCBI Accession No. XP_005989369.1)
MCFIQVLDITIITQMLQGEYFGLQNMSAIIPQPRGNRANQMAYFIITVILMLLWIFRNIMDNVLEVIALHILLLQGAAIMKGICNFAEEVNHVQPRYGGSYWKALEACLNLSKYDVMKIVFAGVLWWHFSSSLFVVWFLHLLVSCLCHLLNNVLGVLKPSPVEVSEIYERNRIGVAHGLAWSYYLGYLKLVLPELEDRIKSYNVSHGNLLKHKETWRLHILLPLSCSIFDNLADVDSNIEFLDNLSELQINRAGIKGRSYKHSLYQVLDEDKRPHYCILEYATPLKSLLEMSKEASAEFTKEDRLEQTKLFYRTLKDILDNSQECRGRFRLVIYDDCQDVLDGEDSGKSHFLSKELLRHLNQQQKEEYFMSEQTQPNSSSTSCLSTEPQLMISDTDAPHTLKSGF

SEQ ID NO: 365 - protein, 378 aa, Sus scrofa
  WT Boar STING
MPYSSLHPSIPQPRGLRAQVAALVLLGACLVALWGLGELPEYTLRWLVLHLASQQIGLLVKGLCSLAEELCHVHSRYQSSYWRAARACLGCPIRCGALLLLSCYFYFSIRDKAGLPLPWMLALLGLSQALNILLGLQHLAPAEVSAICEKRNFNVAHGLAWSYYIGYLRLILPGLRARIQAYNQRHKNVLGGIGNHRLHILFPLDCGVPDDLSVADPNIRFLHELPQQSADRAGIKGRVYTNSIYELLENGQPAGVCVLGYATPLQTLFAMSQDGRAGFSREDRLEQAKLFCRTLEDILADAPEAQNNCRLIVYQEPTEGGSFSLSQEILRHLRQEEREVTMGSAETSVVPTSSTLSQEPELLISGMEQPLPLRSDIF

SEQ ID NO: 366 - protein, 380 aa, Rousettus aegyptiacus
  WT Bat STING
MSHSSLHPSVPRPRGRRARNIAAFVLLIVCLAALWLSGKPSEYTLRCLVLHLASQQLGLLSNRVCYLAEELSHIHSRYQGNYWRAVRACLSCPIRFGVVLLVSFFFYTSLPNIDDLPLTWMLAHLGLSEALNILLGLRGLTPAEVSTVCEQRHFNVAHGLAWSYYIGYLRLILPGLRARIHTYNQLHGNTLQGVGSHRLYILFPLDCGVLDDLSAADPNIRFLRELPRQSSDRAGIKNRVYTNSVYELLEKGKPVGTCVLEYATPLQTLFAMSQDARAGFSQEDRLEQAKLFCRTLADILADDPESQKSCRLIVYQEPTEESDFSLSQAILKHLRQEEKEEVTVGTVGTYEAPGSSTLHQEPELLISGMDQPLPLRTDIF

SEQ ID NO: 367 - protein, 387 aa, Trichechus manatus latirostris
  WT Manatee STING
MVEMPHSSLHPSIPRHRGHGIQKAAFVLLVACLVALWELGEPPGHTLQWLVCQLASLQLGLLLKVICSLAEELCHVHSRYQSSYWRAVRACMGCPIRRGALLLLSCYFYFCFPNMADLPLTWTLALLGLLQAMNILLSLQGLTPAEISAICEKRNLNVAHGLAWSYYIGYLRLILPGLQDRIRIYNLQHNNMLRGTGSQRLHILFPLDCGVPNDLSVADANIRFLQKLPQQSADCAGIKGRVYTNSVYQLLEHGQPAGICVLEYATPLQTLFAMSQDGRAGFSREDRLEQAKLFCRTLEDILADAPEYQNNCRLIVYQESAEGSSFSLSQEILRHLRQEEREEVTVGSVGTSVVPSPSSPSTSSLSQEPKLLISGMEQPLPLRTDVF

SEQ ID NO: 368 - protein, 378 aa, Callorhinchus milii
  WT Ghost shark STING
MSDSIPRPRGKVATYVGLILMSGLACLYFMLTPDYHIKFIVQQVAQQLIVSFFALCLLRLCEFVEELGHKQTRYQNSWVRALNASLDWKKYGFCLLISLLFNWVLPYEKHMSYAVPTVGQTISLTCFCVLFLKVFQLDVLSPAQISEISETNKCNVAHGLAWSYYLGYLKIVLPKLEEKINQYHREYGNVLQQKGKKLYILIPFSCKVLDKLEKVDTNIVFYQNLPELLVDRAGIKSRSYKHSIYLIYDQKKQQPHHCILEYATPLRSLFEMTNDSAAAFSKEQRLDQAKLFYRTLKSILNNVPEVTGSYRLIPYDDDLEGAELGPHFVSEEILKHMRQELTEYPVAEPSNANETDCMSSEPHLMISDDPKPLRSYCP

SEQ ID NO: 369 - protein, 378 aa, Mus musculus
  WT Mouse STING
MPYSNLHPAIPRPRGHRSKYVALIFLVASLMILWVAKDPPNHTLKYLALHLASHELGLLLKNLCCLAEELCHVQSRYQGSYWKAVRACLGCPIHCMAMILLSSYFYFLQNTADIYLSWMFGLLVLYKSLSMLLGLQSLTPAEVSAVCEEKKLNVAHGLAWSYYIGYLRLILPGLQARIRMFNQLHNNMLSGAGSRRLYILFPLDCGVPDNLSVVDPNIRFRDMLPQQNIDRAGIKNRVYSNSVYEILENGQPAGVCILEYATPLQTLFAMSQDAKAGFSREDRLEQAKLFCRTLEEILEDVPESRNNCRLIVYQEPTDGNSFSLSQEVLRHIRQEEKEEVTMNAPMTSVAPPPSVLSQEPRLLISGMDQPLPLRTDLI

SEQ ID NO: 370 - protein, 43 aa, Homo sapiens
  Human STING C-terminal tail (CTT)
EKEEVTVGSLKTSAVPSTSTMSQEPELLISGMEKPLPLRTDFS

SEQ ID NO: 371 - protein, 43 aa, Sarcophilus harrisii
  Tasmanian devil STING C-terminal tail (CTT)
RQEEFAIGPKRAMTVTTSSTLSQEPQLLISGMEQPLSLRTDGF

SEQ ID NO: 372 - protein, 43 aa, Callithrix jacchus
  Marmoset STING C-terminal tail (CTT)
EEEEVTVGSLKTSEVPSTSTMSQEPELLISGMEKPLPLRSDLF

SEQ ID NO: 373 - protein, 42 aa, Bos taurus
  Cattle/Bovine STING C-terminal tail (CTT)
EREVTMGSTETSVMPGSSVLSQEPELLISGLEKPLPLRSDVF

SEQ ID NO: 374 - protein, 42 aa, Felis catus
  Cat STING C-terminal tail (CTT)
EREVTVGSVGTSMVRNPSVLSQEPNLLISGMEQPLPLRTDVF

SEQ ID NO: 375 - protein, 35 aa, Struthio camelus australis
  Ostrich STING C-terminal tail (CTT)
RQEEYTVCDGTLCSTDLSLQISESDLPQPLRSDCL

SEQ ID NO: 376 - protein, 42 aa, Sus scrofa
  Boar STING C-terminal tail (CTT)
EREVTMGSAETSVVPTSSTLSQEPELLISGMEQPLPLRSDIF

SEQ ID NO: 377 - protein, 43 aa, Rousettus aegyptiacus
  Bat STING C-terminal tail (CTT)
EKEEVTVGTVGTYEAPGSSTLHQEPELLISGMDQPLPLRTDIF

SEQ ID NO: 378 - protein, 48 aa, Trichechus manatus latirostris
  Manatee STING C-terminal tail (CTT)
EREEVTVGSVGTSVVPSPSSPSTSSLSQEPKLLISGMEQPLPLRTDVF

SEQ ID NO: 379 - protein, 43 aa, Nipponia nippon
  Crested ibis STING C-terminal tail (CTT)
CHEEYTVYEGNQPHNPSTTLHSTELNLQISESDLPQPLRSDCF

SEQ ID NO: 380 - protein, 43 aa, Latimeria chalumnae
  Coelacanth STING (SEQ ID NO:363) C-terminal tail (CTT)
QKEEYFMSEQTQPNSSSTSCLSTEPQLMISDTDAPHTLKRQVC

SEQ ID NO: 381 - protein, 42 aa, Latimeria chalumnae
  Coelacanth STING (SEQ ID NO:364) C-terminal tail (CTT)
QKEEYFMSEQTQPNSSSTSCLSTEPQLMISDTDAPHTLKSGF

SEQ ID NO: 382 - protein, 71 aa, Danio rerio
  Zebrafish STING C-terminal tail (CTT)
DGEIFMDPTNEVHPVPEEGPVGNCNGALQATFHEEPMSDEPTLMFSRPQSLRSEPVETTDYFNPSSAMKQN

SEQ ID NO: 383 - protein, 38 aa, Callorhinchus milii
  Ghost shark STING C-terminal tail (CTT)
LTEYPVAEPSNANETDCMSSEPHLMISDDPKPLRSYCP

SEQ ID NO: 384 - protein, 43 aa, Mus musculus
  Mouse STING C-terminal tail (CTT)
EKEEVTMNAPMTSVAPPPSVLSQEPRLLISGMDQPLPLRTDLI

SEQ ID NO: 385 - protein, 78 aa, Salmonella typhimurium
  LppA (strain LT2/ ATCC 700720)
MNRTKLVLGAVILGSTLLAGCSSNAKIDQLSSDVQTLNAKVDQLSNDVNAMRSDVQAAKDDAARANQRLDNQATKYRK

SEQ ID NO: 386 - protein, 79 aa, Salmonella typhimurium
  LppB (strain LT2/ ATCC 700720)
MNRTNQLILGAVVLGSTLLAGCSSNAKIDQLSSDVQTLSAKVEQLSNDVNAMRSDVQAAKDDAARANQRLDNKVFRICK

SEQ ID NO: 387 - DNA, 237 bp, Salmonella typhimurium
  lppA
ttacttacggtatttagtagcctggttgtccagacgctggttagcgcgagctgcgtcgtctttagcagcctgaacgtcggaacgcattgcgttcacgtcgttgctcagctggtcaactttagcgttcagagtctgaacgtcagaagacagctgatcgattttagcgttgctggagcaaccagccagcagagtagaacccaggattaccgcgcccagtaccagtttagtacgattcat

SEQ ID NO: 388 - DNA, 240 bp, Salmonella typhimurium
  lppB
ttatttacagatgcggaatactttgttgtccagacgttggttcgcgcgagcagcatcgtctttagcagcctgaacgtcggaacgcattgcatttacgtcattactcagttgctcaactttagcgctcagcgtctgtacatcggaagacaactgatcgattttagcgttgcttgaacaacctgccagtaacgtggaacccagaactactgcacctaagatcagctggttagtacggttcat

SEQ ID NO: 389 - protein, 254 aa, Homo sapiens; identical to SEQ ID NO: 342
  Human 4-1BBL, full-length
  DOMAIN (1)...(28): Cytoplasmic domain
  DOMAIN (29)...(49): Transmembrane domain
  DOMAIN (50)...(254): Extracellular domain

SEQ ID NO: 390 - protein, 227 aa, Artificial Sequence
  Human 4-1BBL with deleted cytoplasmic domain
MWALVAGLLLLLLLAAACAVFLACPWAVSGARASPGSAASPRLREGPELSPDDPAGLLDLRQGMFAQLVAQNVLLIDGPLSWYSDPGLAGVSLTGGLSYKEDTKELVVAKAGVYYVFFQLELRRVVAGEGSGSVSLALHLQPLRSAAGAAALALTVDLPPASSEARNSAFGFQGRLLHLSAGQRLGVHLHTEARARHAWQLTQGATVLGLFRVTPEIPAGLPSPRSE

SEQ ID NO: 391 - protein, 231 aa, Artificial Sequence
  Human 4-1BBL with truncated cytoplasmic domain
MRVLPWALVAGLLLLLLLAAACAVFLACPWAVSGARASPGSAASPRLREGPELSPDDPAGLLDLRQGMFAQLVAQNVLLIDGPLSWYSDPGLAGVSLTGGLSYKEDTKELVVAKAGVYYVFFQLELRRVVAGEGSGSVSLALHLQPLRSAAGAAALALTVDLPPASSEARNSAFGFQGRLLHLSAGQRLGVHLHTEARARHAWQLTQGATVLGLFRVTPEIPAGLPSPRSE

SEQ ID NO: 392 - protein, 241 aa, Artificial Sequence
  Human 4-1BBL with truncated cytoplasmic domain and Myc tag
  misc_feature (2)...(11): Myc tag
  misc_feature (12)...(15): Truncated cytoplasmic domain
  DOMAIN (16)...(36): Transmembrane domain
  DOMAIN (37)...(241): Extracellular domain
MEQKLISEEDLRVLPWALVAGLLLLLLLAAACAVFLACPWAVSGARASPGSAASPRLREGPELSPDDPAGLLDLRQGMFAQLVAQNVLLIDGPLSWYSDPGLAGVSLTGGLSYKEDTKELVVAKAGVYYVFFQLELRRVVAGEGSGSVSLALHLQPLRSAAGAAALALTVDLPPASSEARNSAFGFQGRLLHLSAGQRLGVHLHTEARARHAWQLTQGATVLGLFRVTPEIPAGLPSPRSE

SEQ ID NO: 393 - protein, 309 aa, Mus musculus; identical to SEQ ID NO: 344
  Mouse 4-1BBL, full-length
  DOMAIN (1)...(82): Cytoplasmic domain
  DOMAIN (83)...(103): transmembrane domain
  DOMAIN (104)...(309): extracellular domain

SEQ ID NO: 394 - protein, 228 aa, Artificial Sequence
  Mouse 4-1BBL with deleted cytoplasmic domain
MLYGLVALVLLLLIAACVPIFTRTEPRPALTITTSPNLGTRENNADQVTPVSHIGCPNTTQQGSPVFAKLLAKNQASLCNTTLNWHSQDGAGSSYLSQGLRYEEDKKELVVDSPGLYYVFLELKLSPTFTNTGHKVQGWVSLVLQAKPQVDDFDNLALTVELFPCSMENKLVDRSWSQLLLLKAGHRLSVGLRAYLHGAQDAYRDWELSYPNTTSFGLFLVKPDNPWE

SEQ ID NO: 395 - protein, 233 aa, Artificial Sequence
  Mouse 4-1BBL with truncated cytoplasmic domain
MSRHPKLYGLVALVLLLLIAACVPIFTRTEPRPALTITTSPNLGTRENNADQVTPVSHIGCPNTTQQGSPVFAKLLAKNQASLCNTTLNWHSQDGAGSSYLSQGLRYEEDKKELVVDSPGLYYVFLELKLSPTFTNTGHKVQGWVSLVLQAKPQVDDFDNLALTVELFPCSMENKLVDRSWSQLLLLKAGHRLSVGLRAYLHGAQDAYRDWELSYPNTTSFGLFLVKPDNPWE

SEQ ID NO: 396 - protein, 243 aa, Artificial Sequence
  Mouse 4-1BBL with truncated cytoplasmic domain and Myc tag
  misc_feature (2)...(11): Myc tag
  misc_feature (12)...(16): Truncated cytoplasmic domain
  DOMAIN (17)...(37): Transmembrane domain
  DOMAIN (38)...(243): Extracellular domain
MEQKLISEEDLSRHPKLYGLVALVLLLLIAACVPIFTRTEPRPALTITTSPNLGTRENNADQVTPVSHIGCPNTTQQGSPVFAKLLAKNQASLCNTTLNWHSQDGAGSSYLSQGLRYEEDKKELVVDSPGLYYVFLELKLSPTFTNTGHKVQGWVSLVLQAKPQVDDFDNLALTVELFPCSMENKLVDRSWSQLLLLKAGHRLSVGLRAYLHGAQDAYRDWELSYPNTTSFGLFLVKPDNPWE

SEQ ID NO: 397 - protein, 379 aa, Artificial Sequence
  huSTING N154S/R284G tazCTT
  misc_feature (1)...(336): huSTING (R232 allelle) with N154S/R284G modifications, and without human STING CTT
  misc_feature (337)...(379): Tasmanian devil STING CTT
MPHSSLHPSIPCPRGHGAQKAALVLLSACLVTLWGLGEPPEHTLRYLVLHLASLQLGLLLNGVCSLAEELRHIHSRYRGSYWRTVRACLGCPLRRGALLLLSIYFYYSLPNAVGPPFTWMLALLGLSQALNILLGLKGLAPAEISAVCEKGNFSVAHGLAWSYYIGYLRLILPELQARIRTYNQHYNNLLRGAVSQRLYILLPLDCGVPDNLSMADPNIRFLDKLPQQTGDRAGIKDRVYSNSIYELLENGQRAGTCVLEYATPLQTLFAMSQYSQAGFSREDGLEQAKLFCRTLEDILADAPESQNNCRLIAYQEPADDSSFSLSQEVLRHLRQERQEEFAIGPKRAMTVTTSSTLSQEPQLLISGMEQPLSLRTDGF

SEQ ID NO: 398 - protein, 379 aa, Artificial Sequence
  huSTING N154S/R284G
MPHSSLHPSIPCPRGHGAQKAALVLLSACLVTLWGLGEPPEHTLRYLVLHLASLQLGLLLNGVCSLAEELRHIHSRYRGSYWRTVRACLGCPLRRGALLLLSIYFYYSLPNAVGPPFTWMLALLGLSQALNILLGLKGLAPAEISAVCEKGNFSVAHGLAWSYYIGYLRLILPELQARIRTYNQHYNNLLRGAVSQRLYILLPLDCGVPDNLSMADPNIRFLDKLPQQTGDRAGIKDRVYSNSIYELLENGQRAGTCVLEYATPLQTLFAMSQYSQAGFSREDGLEQAKLFCRTLEDILADAPESQNNCRLIAYQEPADDSSFSLSQEVLRHLRQEEKEEVTVGSLKTSAVPSTSTMSQEPELLISGMEKPLPLRTDFS

SEQ ID NO: 399 - protein, 378 aa, Artificial Sequence
  muSTING C205Y
MPYSNLHPAIPRPRGHRSKYVALIFLVASLMILWVAKDPPNHTLKYLALHLASHELGLLLKNLCCLAEELCHVQSRYQGSYWKAVRACLGCPIHCMAMILLSSYFYFLQNTADIYLSWMFGLLVLYKSLSMLLGLQSLTPAEVSAVCEEKKLNVAHGLAWSYYIGYLRLILPGLQARIRMFNQLHNNMLSGAGSRRLYILFPLDYGVPDNLSVVDPNIRFRDMLPQQNIDRAGIKNRVYSNSVYEILENGQPAGVCILEYATPLQTLFAMSQDAKAGFSREDRLEQAKLFCRTLEEILEDVPESRNNCRLIVYQEPTDGNSFSLSQEVLRHIRQEEKEEVTMNAPMTSVAPPPSVLSQEPRLLISGMDQPLPLRTDLI

SEQ ID NO: 400 - protein, 378 aa, Artificial Sequence
  muSTING R283G
MPYSNLHPAIPRPRGHRSKYVALIFLVASLMILWVAKDPPNHTLKYLALHLASHELGLLLKNLCCLAEELCHVQSRYQGSYWKAVRACLGCPIHCMAMILLSSYFYFLQNTADIYLSWMFGLLVLYKSLSMLLGLQSLTPAEVSAVCEEKKLNVAHGLAWSYYIGYLRLILPGLQARIRMFNQLHNNMLSGAGSRRLYILFPLDCGVPDNLSVVDPNIRFRDMLPQQNIDRAGIKNRVYSNSVYEILENGQPAGVCILEYATPLQTLFAMSQDAKAGFSREDGLEQAKLFCRTLEEILEDVPESRNNCRLIVYQEPTDGNSFSLSQEVLRHIRQEEKEEVTMNAPMTSVAPPPSVLSQEPRLLISGMDQPLPLRTDLI

SEQ ID NO: 401 - DNA, 1500 bp, Artificial Sequence
  anti-human CTLA-4 scFv-Fc
atggagacacctgcccagctgctgttcctgctgctgctgtggctgcccgacaccaccggcgagatcgtgctgacccagtctcctggcaccctgagcctgagccccggcgagagagccacactgagctgcagagcttctcagagcgtcggatcttcttatctggcctggtatcagcaaaagcccggacaagctcctcggctgctgatctacggcgccttcagccgggctacaggcatccctgatagattcagcggcagcggctctggcactgatttcaccctgaccattagcagactggaacctgaggacttcgccgtgtactactgccagcagtacgggagcagcccttggacctttggacaaggcaccaaggtggaaatcaagcgtggaggaggcggctcaggcggcggaggaagcggcggcggcggctccggcggcggaggcagccaggttcagctggttgaaagcggaggcggcgtggtccagcctggtagaagcctgcggctgtcttgcgccgccagcggctttacatttagcagctacaccatgcactgggtgcggcaggcccctggcaagggcctggaatgggtcaccttcatcagctacgacggcaacaacaagtactacgccgacagcgtgaaaggcagattcaccatcagcagagataattctaaaaacaccctgtacctgcaaatgaacagcctcagagccgaggataccgctatctactactgtgccagaacaggctggctgggccccttcgactactggggccagggcacactggtgaccgtgtctagcgagcctaagtcttccgataagacacacacctgccctccgtgccccgcccctgaactgctcggcggacctagcgtgttcctgttccctccaaagcctaaggacaccctgatgatctctcgaacacctgaggtgacctgcgtggtggtggacgtgtcccacgaggaccccgaggtgaagttcaactggtacgtggacggcgtggaagtgcacaacgccaagacaaaacctagagaggagcagtacaacagcacctacagagtggtgtccgtgctgaccgtgctgcaccaggactggctgaacggcaaggaatacaagtgcaaggtgtccaacaaggccctgcctgcccctatcgagaagaccatcagcaaggctaaaggccagcccagagagccccaggtgtacacactgcctccaagcagggacgagctgaccaagaaccaggtcagcctgacatgtctggtgaagggcttctacccttctgacatcgccgtggaatgggagagcaacggccagcccgagaacaactacaagacgacccctcctgtgctggacagcgacggatccttcttcctgtacagcaagctgacagttgataagtcccggtggcagcagggcaatgtgtttagctgtagcgtgatgcacgaggccctgcataatcactacacccagaaaagccttagcctgtccccaggcaaatga

SEQ ID NO: 402 - protein, 499 aa, Artificial Sequence
  anti-human CTLA-4 scFv-Fc
  misc_feature (1)...(20): IGKV3-20 leader sequence
  misc_feature (21)...(129): Ipilimumab VL domain
  misc_feature (130)...(149): Gly-Ser linker
  misc_feature (150)...(267): Ipilimumab VH domain
  misc_feature (268)...(499): human IgG1 FC w/ C5S mutation in hinge region
METPAQLLFLLLLWLPDTTGEIVLTQSPGTLSLSPGERATLSCRASQSVGSSYLAWYQQKPGQAPRLLIYGAFSRATGIPDRFSGSGSGTDFTLTISRLEPEDFAVYYCQQYGSSPWTFGQGTKVEIKRGGGGSGGGGSGGGGSGGGGSQVQLVESGGGVVQPGRSLRLSCAASGFTFSSYTMHWVRQAPGKGLEWVTFISYDGNNKYYADSVKGRFTISRDNSKNTLYLQMNSLRAEDTAIYYCARTGWLGPFDYWGQGTLVTVSSEPKSSDKTHTCPPCPAPELLGGPSVFLFPPKPKDTLMISRTPEVTCVVVDVSHEDPEVKFNWYVDGVEVHNAKTKPREEQYNSTYRVVSVLTVLHQDWLNGKEYKCKVSNKALPAPIEKTISKAKGQPREPQVYTLPPSRDELTKNQVSLTCLVKGFYPSDIAVEWESNGQPENNYKTTPPVLDSDGSFFLYSKLTVDKSRWQQGNVFSCSVMHEALHNHYTQKSLSLSPGK

SEQ ID NO: 403 - protein, 267 aa, Artificial Sequence
  anti-human CTLA-4 scFv
  misc_feature (1)...(20): IGKV3-20 leader sequence
  misc_feature (21)...(129): Ipilimumab VL domain
  misc_feature (130)...(149): Gly-ser linker
  misc_feature (150)...(267): Ipilimumab VH domain
METPAQLLFLLLLWLPDTTGEIVLTQSPGTLSLSPGERATLSCRASQSVGSSYLAWYQQKPGQAPRLLIYGAFSRATGIPDRFSGSGSGTDFTLTISRLEPEDFAVYYCQQYGSSPWTFGQGTKVEIKRGGGGSGGGGSGGGGSGGGGSQVQLVESGGGVVQPGRSLRLSCAASGFTFSSYTMHWVRQAPGKGLEWVTFISYDGNNKYYADSVKGRFTISRDNSKNTLYLQMNSLRAEDTAIYYCARTGWLGPFDYWGQGTLVTVSS

SEQ ID NO: 404 - protein, 264 aa, Artificial Sequence
  Anti-Mouse CTLA-4 scFv
  misc_feature (1)...(20): IgK mouse leader sequence
  misc_feature (21)...(132): VL of clone 9D9
  misc_feature (133)...(147): Gly-Ser linker
  misc_feature (148)...(264): VH of clone 9D9
METDTLLLWVLLLWVPGSTGDIVMTQTTLSLPVSLGDQASISCRSSQSIVHSNGNTYLEWYLQKPGQSPKLLIYKVSNRFSGVPDRFSGSGSGTDFTLKISRVEAEDLGVYYCFQGSHVPYTFGGGTKLEIKGGGGSGGGGSGGGGSEAKLQESGPVLVKPGASVKMSCKASGYTFTDYYMNWVKQSHGKSLEWIGVINPYNGDTSYNQKFKGKATLTVDKSSSTAYMELNSLTSEDSAVYYCARYYGSWFAYWGQGTLVTVSS

SEQ ID NO: 405 - protein, 497 aa, Artificial Sequence
  Anti-Mouse CTLA-4 scFv-Fc
  misc_feature (1)...(20): IgK mouse leader sequence
  misc_feature (21)...(132): VL of clone 9D9
  misc_feature (133)...(147): Gly-Ser linker
  misc_feature (148)...(264): VH of clone 9D9
  misc_feature (265)...(497): mouse IgG2a Fc
METDTLLLWVLLLWVPGSTGDIVMTQTTLSLPVSLGDQASISCRSSQSIVHSNGNTYLEWYLQKPGQSPKLLIYKVSNRFSGVPDRFSGSGSGTDFTLKISRVEAEDLGVYYCFQGSHVPYTFGGGTKLEIKGGGGSGGGGSGGGGSEAKLQESGPVLVKPGASVKMSCKASGYTFTDYYMNWVKQSHGKSLEWIGVINPYNGDTSYNQKFKGKATLTVDKSSSTAYMELNSLTSEDSAVYYCARYYGSWFAYWGQGTLVTVSSEPRGPTIKPCPPCKCPAPNLLGGPSVFIFPPKIKDVLMISLSPIVTCVVVDVSEDDPDVQISWFVNNVEVHTAQTQTHREDYNSTLRVVSALPIQHQDWMSGKEFKCKVNNKDLPAPIERTISKPKGSVRAPQVYVLPPPEEEMTKKQVTLTCMVTDFMPEDIYVEWTNNGKTELNYKNTEPVLDSDGSYFMYSKLRVEKKNWVERNSYSCSVVHEGLHNHHTTKSFSRTPGK

SEQ ID NO: 406 - protein, 417 aa, Artificial Sequence
  murine soluble TGF-beta Receptor II-Fc Fusion (mu sTGFbRII-Fc)
  misc_feature (1)...(184): mouse soluble TGFbeta Receptor II
  misc_feature (185)...(417): mouse IgG2a Fc
MGRGLLRGLWPLHIVLWTRIASTIPPHVPKSDVEMEAQKDASIHLSCNRTIHPLKHFNSDVMASDNGGAVKLPQLCKFCDVRLSTCDNQKSCMSNCSITAICEKPHEVCVAVWRKNDKNITLETVCHDPKLTYHGFTLEDAASPKCVMKEKKRAGETFFMCACNMEECNDYIIFSEEYTTSSPDEPRGPTIKPCPPCKCPAPNLLGGPSVFIFPPKIKDVLMISLSPIVTCVVVDVSEDDPDVQISWFVNNVEVHTAQTQTHREDYNSTLRVVSALPIQHQDWMSGKEFKCKVNNKDLPAPIERTISKPKGSVRAPQVYVLPPPEEEMTKKQVTLTCMVTDFMPEDIYVEWTNNGKTELNYKNTEPVLDSDGSYFMYSKLRVEKKNWVERNSYSCSVVHEGLHNHHTTKSFSRTPGK

SEQ ID NO: 407 - protein, 391 aa, Artificial Sequence
  Human soluble TGF-beta Receptor II-Fc Fusion (hu sTGFbRII-Fc)
  misc_feature (1)...(159): Human soluble TGF-beta Receptor II
  misc_feature (160)...(391): human IgG1 Fc
MGRGLLRGLWPLHIVLWTRIASTIPPHVQKSVNNDMIVTDNNGAVKFPQLCKFCDVRFSTCDNQKSCMSNCSITSICEKPQEVCVAVWRKNDENITLETVCHDPKLPYHDFILEDAASPKCIMKEKKKPGETFFMCSCSSDECNDNIIFSEEYNTSNPDEPKSCDKTHTCPPCPAPELLGGPSVFLFPPKPKDTLMISRTPEVTCVVVDVSHEDPEVKFNWYVDGVEVHNAKTKPREEQYNSTYRVVSVLTVLHQDWLNGKEYKCKVSNKALPAPIEKTISKAKGQPREPQVYTLPPSRDELTKNQVSLTCLVKGFYPSDIAVEWESNGQPENNYKTTPPVLDSDGSFFLYSKLTVDKSRWQQGNVFSCSVMHEALHNHYTQKSLSLSPGK

SEQ ID NO: 408 - DNA, 3222 bp, Artificial Sequence
  Plasmid pSL0209
gacgaaagggcctcgtgatacgcctatttttataggttaatgtcatgataataatggtttcttagacgtcaggtggcacttttcggggaaatgtgcgcggaacccctatttgtttatttttctaaatacattcaaatatgtatccgctcatgagacaataaccctgataaatgcttcaataatattgaaaaaggaagagtatgagtattcaacatttccgtgtcgcccttattcccttttttgcggcattttgccttcctgtttttgctcacccagaaacgctggtgaaagtaaaagatgctgaagatcagttgggtgcacgagtgggttacatcgaactggatctcaacagcggtaagatccttgagagttttcgccccgaagaacgttttccaatgatgagcacttttaaagttctgctatgtggcgcggtattatcccgtattgacgccgggcaagagcaactcggtcgccgcatacactattctcagaatgacttggttgagtactcaccagtcacagaaaagcatcttacggatggcatgacagtaagagaattatgcagtgctgccataaccatgagtgataacactgcggccaacttacttctgacaacgatcggaggaccgaaggagctaaccgcttttttgcacaacatgggggatcatgtaactcgccttgatcgttgggaaccggagctgaatgaagccataccaaacgacgagcgtgacaccacgatgcctgtagcaatggcaacaacgttgcgcaaactattaactggcgaactacttactctagcttcccggcaacaattaatagactggatggaggcggataaagttgcaggaccacttctgcgctcggcccttccggctggctggtttattgctgataaatctggagccggtgagcgtgggtctcgcggtatcattgcagcactggggccagatggtaagccctcccgtatcgtagttatctacacgacggggagtcaggcaactatggatgaacgaaatagacagatcgctgagataggtgcctcactgattaagcattggtaactgtcagaccaagtttactcatatatactttagattgatttaaaacttcatttttaatttaaaaggatctaggtgaagatcctttttgataatctcatgaccaaaatcccttaacgtgagttttcgttccactgagcgtcagaccccgtagaaaagatcaaaggatcttcttgagatcctttttttctgcgcgtaatctgctgcttgcaaacaaaaaaaccaccgctaccagcggtggtttgtttgccggatcaagagctaccaactctttttccgaaggtaactggcttcagcagagcgcagataccaaatactgttcttctagtgtagccgtagttaggccaccacttcaagaactctgtagcaccgcctacatacctcgctctgctaatcctgttaccagtggctgctgccagtggcgataagtcgtgtcttaccgggttggactcaagacgatagttaccggataaggcgcagcggtcgggctgaacggggggttcgtgcacacagcccagcttggagcgaacgacctacaccgaactgagatacctacagcgtgagctatgagaaagcgccacgcttcccgaagggagaaaggcggacaggtatccggtaagcggcagggtcggaacaggagagcgcacgagggagcttccagggggaaacgcctggtatctttatagtcctgtcgggtttcgccacctctgacttgagcgtcgatttttgtgatgctcgtcaggggggcggagcctatggaaaaacgccagcaacgcggcctttttacggttcctggccttttgctggccttttgctcacatgttctttcctgcgttatcccctgattctgtggataaccgtattaccgcctttgagtgagctgataccgctcgccgcagccgaacgaccgagcgcagcgagtcagtgagcgaggaagcggaagagcgcccaatacgcaaaccgcctctccccgcgcgttggccgattcattaatgcagctggcacgacaggtttcccgactggaaagcgggcagtgagcgcaacgcaattaatgtgagttagctcactcattaggcaccccaggctttacactttatgcttccggctcgtatgttgtgtggaattgtgagcggataacaatttcacacaggaaacagctatgaccatgattacgccaagctcggcgcgccattgggatggaacggtcagatcgtcgtgaatacctggcacaggtgaaagaggttctgccgcaactgcgcttcgattaacaaatgcgctgacagagccggtacgcgatgtgtgccggcttttttgttttgtgtgagacgcagacgtcgctacactattcacaattccttttcgcgtcagcagaccctggaaaagcatggaaaccaaaaaaaatagctagcctcaataagcttcttgcctttctgcagaccaaggacccagattatgtataaataaagcctctcgtaagagaggctttatgctgacaaaccctgtactacctgatgaacaggcgtgggggagttttactcaacggtcaaaatacgcgtggtattggttgaaccgacggtgctcatgacatcgccctgggtcacgataaccaggtcgccggaaaccagataccctttatcgcgcagcagattaacagcttcatgtgccgcgacaacgccatcagccgcgctatcaaaatgcaccggcgttactccgcgatagagcgcggtcaggttcagcgtgcgttcatggatcccaatacgcgtcaattcactggccgtcgttttacaacgtcgtgactgggaaaaccctggcgttacccaacttaatcgccttgcagcacatccccctttcgccagctggcgtaatagcgaagaggcccgcaccgatcgcccttcccaacagttgcgcagcctgaatggcgaatggcgcctgatgcggtattttctccttacgcatctgtgcggtatttcacaccgcatatggtgcactctcagtacaatctgctctgatgccgcatagttaagccagccccgacacccgccaacacccgctgacgcgccctgacgggcttgtctgctcccggcatccgcttacagacaagctgtgaccgtctccgggagctgcatgtgtcagaggttttcaccgtcatcaccgaaacgcgcga

SEQ ID NO: 409 - DNA, 4235 bp, Artificial Sequence
  Plasmid pSL0211
gacgaaagggcctcgtgatacgcctatttttataggttaatgtcatgataataatggtttcttagacgtcaggtggcacttttcggggaaatgtgcgcggaacccctatttgtttatttttctaaatacattcaaatatgtatccgctcatgagacaataaccctgataaatgcttcaataatattgaaaaaggaagagtatgagtattcaacatttccgtgtcgcccttattcccttttttgcggcattttgccttcctgtttttgctcacccagaaacgctggtgaaagtaaaagatgctgaagatcagttgggtgcacgagtgggttacatcgaactggatctcaacagcggtaagatccttgagagttttcgccccgaagaacgttttccaatgatgagcacttttaaagttctgctatgtggcgcggtattatcccgtattgacgccgggcaagagcaactcggtcgccgcatacactattctcagaatgacttggttgagtactcaccagtcacagaaaagcatcttacggatggcatgacagtaagagaattatgcagtgctgccataaccatgagtgataacactgcggccaacttacttctgacaacgatcggaggaccgaaggagctaaccgcttttttgcacaacatgggggatcatgtaactcgccttgatcgttgggaaccggagctgaatgaagccataccaaacgacgagcgtgacaccacgatgcctgtagcaatggcaacaacgttgcgcaaactattaactggcgaactacttactctagcttcccggcaacaattaatagactggatggaggcggataaagttgcaggaccacttctgcgctcggcccttccggctggctggtttattgctgataaatctggagccggtgagcgtgggtctcgcggtatcattgcagcactggggccagatggtaagccctcccgtatcgtagttatctacacgacggggagtcaggcaactatggatgaacgaaatagacagatcgctgagataggtgcctcactgattaagcattggtaactgtcagaccaagtttactcatatatactttagattgatttaaaacttcatttttaatttaaaaggatctaggtgaagatcctttttgataatctcatgaccaaaatcccttaacgtgagttttcgttccactgagcgtcagaccccgtagaaaagatcaaaggatcttcttgagatcctttttttctgcgcgtaatctgctgcttgcaaacaaaaaaaccaccgctaccagcggtggtttgtttgccggatcaagagctaccaactctttttccgaaggtaactggcttcagcagagcgcagataccaaatactgttcttctagtgtagccgtagttaggccaccacttcaagaactctgtagcaccgcctacatacctcgctctgctaatcctgttaccagtggctgctgccagtggcgataagtcgtgtcttaccgggttggactcaagacgatagttaccggataaggcgcagcggtcgggctgaacggggggttcgtgcacacagcccagcttggagcgaacgacctacaccgaactgagatacctacagcgtgagctatgagaaagcgccacgcttcccgaagggagaaaggcggacaggtatccggtaagcggcagggtcggaacaggagagcgcacgagggagcttccagggggaaacgcctggtatctttatagtcctgtcgggtttcgccacctctgacttgagcgtcgatttttgtgatgctcgtcaggggggcggagcctatggaaaaacgccagcaacgcggcctttttacggttcctggccttttgctggccttttgctcacatgttctttcctgcgttatcccctgattctgtggataaccgtattaccgcctttgagtgagctgataccgctcgccgcagccgaacgaccgagcgcagcgagtcagtgagcgaggaagcggaagagcgcccaatacgcaaaccgcctctccccgcgcgttggccgattcattaatgcagctggcacgacaggtttcccgactggaaagcgggcagtgagcgcaacgcaattaatgtgagttagctcactcattaggcaccccaggctttacactttatgcttccggctcgtatgttgtgtggaattgtgagcggataacaatttcacacaggaaacagctatgaccatgattacgccaagctcggcgcgccattgggatggaacggtcagatcgtcgtgaatacctggcacaggtgaaagaggttctgccgcaactgcgcttcgattaacaaatgcgctgacagagccggtacgcgatgtgtgccggcttttttgttttgtgtgagacgcagacgtcgctacactattcacaattccttttcgcgtcagcagaccctggaaaagcatggaaaccaaaaaaaatagctagcctcaataagcttataacttcgtataatgtatgctatacgaagttatgagcctgaattcagaagaactcgtcaagaaggcgatagaaggcgatgcgctgcgaatcgggagcggcgataccgtaaagcacgaggaagcggtcagcccattcgccgccaagctcttcagcaatatcacgggtagccaacgctatgtcctgatagcggtccgccacacccagccggccacagtcgatgaatccagaaaagcggccattttccaccatgatattcggcaagcaggcatcgccatgggtcacgacgagatcctcgccgtcgggcatgctcgccttgagcctggcgaacagttcggctggcgcgagcccctgatgctcttcgtccagatcatcctgatcgacaagaccggcttccatccgagtacgtgctcgctcgatgcgatgtttcgcttggtggtcgaatgggcaggtagccggatcaagcgtatgcagccgccgcattgcatcagccatgatggatactttctcggcaggagcaaggtgagatgacaggagatcctgccccggcacttcgcccaatagcagccagtcccttcccgcttcagtgacaacgtcgagcacagctgcgcaaggaacgcccgtcgtggccagccacgatagccgcgctgcctcgtcttgcagttcattcagggcaccggacaggtcggtcttgacaaaaagaaccgggcgcccctgcgctgacagccggaacacggcggcatcagagcagccgattgtctgttgtgcccagtcatagccgaatagcctctccacccaagcggccggagaacctgcgtgcaatccatcttgttcaatcatgcgaaacgatcctcatcctgtctcttgatcagagcttgatcccctgcgccatcagatccttggcggcgagaaagccatccagtttactttgcagggcttcccaaccttaccagagggcgccccagctggcaattccggaattcggcaagataacttcgtataatgtatgctatacgaagttatctgcagaccaaggacccagattatgtataaataaagcctctcgtaagagaggctttatgctgacaaaccctgtactacctgatgaacaggcgtgggggagttttactcaacggtcaaaatacgcgtggtattggttgaaccgacggtgctcatgacatcgccctgggtcacgataaccaggtcgccggaaaccagataccctttatcgcgcagcagattaacagcttcatgtgccgcgacaacgccatcagccgcgctatcaaaatgcaccggcgttactccgcgatagagcgcggtcaggttcagcgtgcgttcatggatcccaatacgcgtcaattcactggccgtcgttttacaacgtcgtgactgggaaaaccctggcgttacccaacttaatcgccttgcagcacatccccctttcgccagctggcgtaatagcgaagaggcccgcaccgatcgcccttcccaacagttgcgcagcctgaatggcgaatggcgcctgatgcggtattttctccttacgcatctgtgcggtatttcacaccgcatatggtgcactctcagtacaatctgctctgatgccgcatagttaagccagccccgacacccgccaacacccgctgacgcgccctgacgggcttgtctgctcccggcatccgcttacagacaagctgtgaccgtctccgggagctgcatgtgtcagaggttttcaccgtcatcaccgaaacgcgcga

SEQ ID NO: 410 - DNA, 26 bp, Artificial Sequence
  purm-1 primer
ccagatgtggcttgtttatacttcgc

SEQ ID NO: 411 - DNA, 25 bp, Artificial Sequence
  purm-2 primer
ccttattgctgaatactgccctgag

SEQ ID NO: 412 - DNA, 25 bp, Artificial Sequence
  purm-3 primer
cgtgtcgcaattcttaatgccatag

SEQ ID NO: 413 - DNA, 23 bp, Artificial Sequence
  purm-4 primer
caaacatcggactcagaatacgc

SEQ ID NO: 414 - DNA, 23 bp, Artificial Sequence
  purm-5 primer
caggcgataaaggctaacaaccg

SEQ ID NO: 415 - DNA, 23 bp, Artificial Sequence
  purm-6 primer
ttgacctggatcaaccaaaagcg

SEQ ID NO: 416 - DNA, 21 bp, Artificial Sequence
  acrd-1 primer
cctgcgaccgatactgatgac

SEQ ID NO: 417 - DNA, 20 bp, Artificial Sequence
  acrd-3 primer
gctactcgctacctggatgc

SEQ ID NO: 418 - DNA, 23 bp, Artificial Sequence
  msbB-1 primer
ggtcagatcgtcgtgaatacctg

SEQ ID NO: 419 - DNA, 20 bp, Artificial Sequence
  msbB-2 primer
atgaacgcacgctgaacctg

SEQ ID NO: 420 - DNA, 23 bp, Artificial Sequence
  msbB-3 primer
acaccacacgttacatgcacttg

SEQ ID NO: 421 - DNA, 20 bp, Artificial Sequence
  msbB-4 primer
aagccattgccatgtctgcg

SEQ ID NO: 422 - DNA, 1566 bp, Homo sapiens
  Interleukin 15 receptor subunit alpha (IL15RA), transcript variant 1, mRNA (GenBank Accession No.: NM_002189.4)
ctgggcagcgctcgcccggggagtccagcggtgtcctgtggagctgccgccatggccccgcggcgggcgcgcggctgccggaccctcggtctcccggcgctgctactgctgctgctgctccggccgccggcgacgcggggcatcacgtgccctccccccatgtccgtggaacacgcagacatctgggtcaagagctacagcttgtactccagggagcggtacatttgtaactctggtttcaagcgtaaagccggcacgtccagcctgacggagtgcgtgttgaacaaggccacgaatgtcgcccactggacaacccccagtctcaaatgcattagagaccctgccctggttcaccaaaggccagcgccaccctccacagtaacgacggcaggggtgaccccacagccagagagcctctccccttctggaaaagagcccgcagcttcatctcccagctcaaacaacacagcggccacaacagcagctattgtcccgggctcccagctgatgccttcaaaatcaccttccacaggaaccacagagataagcagtcatgagtcctcccacggcaccccctctcagacaacagccaagaactgggaactcacagcatccgcctcccaccagccgccaggtgtgtatccacagggccacagcgacaccactgtggctatctccacgtccactgtcctgctgtgtgggctgagcgctgtgtctctcctggcatgctacctcaagtcaaggcaaactcccccgctggccagcgttgaaatggaagccatggaggctctgccggtgacttgggggaccagcagcagagatgaagacttggaaaactgctctcaccacctatgaaactcggggaaaccagcccagctaagtccggagtgaaggagcctctctgctttagctaaagacgactgagaagaggtgcaaggaagcgggctccaggagcaagctcaccaggcctctcagaagtcccagcaggatctcacggactgccgggtcggcgcctcctgcgcgagggagcaggttctccgcattcccatgggcaccacctgcctgcctgtcgtgccttggacccagggcccagcttcccaggagagaccaaaggcttctgagcaggatttttatttcattacagtgtgagctgcctggaatacatgtggtaatgaaataaaaaccctgccccgaatcttccgtccctcatcctaactttcagttcacagagaaaagtgacatacccaaagctctctgtcaattacaaggcttctcctggcgtgggagacgtctacagggaagacaccagcgtttgggcttctaaccaccctgtctccagctgctctgcacacatggacagggacctgggaaaggtgggagagatgctgagcccagcgaatcctctccattgaaggattcaggaagaagaaaactcaactcagtgccattttacgaatatatgcgtttatatttatacttccttgtctattatatctatacattatatattatttgtattttgacattgtaccttgtataaacaaaataaaacatctattttcaata

SEQ ID NO: 423 - protein, 267 aa, Homo sapiens
  Mature Human IL-15 Receptor Subunit Alpha (IL-15RA; UniProtKB Accession No.: Q13261)
MAPRRARGCRTLGLPALLLLLLLRPPATRGITCPPPMSVEHADIWVKSYSLYSRERYICNSGFKRKAGTSSLTECVLNKATNVAHWTTPSLKCIRDPALVHQRPAPPSTVTTAGVTPQPESLSPSGKEPAASSPSSNNTAATTAAIVPGSQLMPSKSPSTGTTEISSHESSHGTPSQTTAKNWELTASASHQPPGVYPQGHSDTTVAISTSTVLLCGLSAVSLLACYLKSRQTPPLASVEMEAMEALPVTWGTSSRDEDLENCSHHL

SEQ ID NO: 424 - DNA, 2015 bp, Homo sapiens
  IL-15 (IL-15 single chain (sc)), transcript variant 3, mRNA (GenBank Accession No.: NM_000585.5)
cttttcgccaggggttgggactccgggtggcaggcgcccgggggaatcccagctgactcgctcactgccttcgaagtccggcgccccccgggagggaactgggtggccgcaccctcccggctgcggtggctgtcgccccccaccctgcagccaggactcgatggagaatccattccaatatatggccatgtggctctttggagcaatgttccatcatgttccatgctgctgacgtcacatggagcacagaaatcaatgttagcagatagccagcccatacaagatcgtattgtattgtaggaggcattgtggatggatggctgctggaaaccccttgccatagccagctcttcttcaatacttaaggatttaccgtggctttgagtaatgagaatttcgaaaccacatttgagaagtatttccatccagtgctacttgtgtttacttctaaacagtcattttctaactgaagctggcattcatgtcttcattttgggctgtttcagtgcagggcttcctaaaacagaagccaactgggtgaatgtaataagtgatttgaaaaaaattgaagatcttattcaatctatgcatattgatgctactttatatacggaaagtgatgttcaccccagttgcaaagtaacagcaatgaagtgctttctcttggagttacaagttatttcacttgagtccggagatgcaagtattcatgatacagtagaaaatctgatcatcctagcaaacaacagtttgtcttctaatgggaatgtaacagaatctggatgcaaagaatgtgaggaactggaggaaaaaaatattaaagaatttttgcagagttttgtacatattgtccaaatgttcatcaacacttcttgattgcaattgattctttttaaagtgtttctgttattaacaaacatcactctgctgcttagacataacaaaacactcggcatttcaaatgtgctgtcaaaacaagtttttctgtcaagaagatgatcagaccttggatcagatgaactcttagaaatgaaggcagaaaaatgtcattgagtaatatagtgactatgaacttctctcagacttactttactcatttttttaatttattattgaaattgtacatatttgtggaataatgtaaaatgttgaataaaaatatgtacaagtgttgttttttaagttgcactgatattttacctcttattgcaaaatagcatttgtttaagggtgatagtcaaattatgtattggtggggctgggtaccaatgctgcaggtcaacagctatgctggtaggctcctgccagtgtggaaccactgactactggctctcattgacttccttactaagcatagcaaacagaggaagaatttgttatcagtaagaaaaagaagaactatatgtgaatcctcttctttatactgtaatttagttattgatgtataaagcaactgttatgaaataaagaaattgcaataactggcatataatgtccatcagtaaatcttggtggtggtggcaataataaacttctactgataggtagaatggtgtgcaagcttgtccaatcacggattgcaggccacatgcggcccaggacaactttgaatgtggcccaacacaaattcataaactttcatacatctcgtttttagctcatcagctatcattagcggtagtgtatttaaagtgtggcccaagacaattcttcttattccaatgtggcccagggaaatcaaaagattggatgcccctggtatagaaaactaatagtgacagtgttcatatttcatgctttcccaaatacaggtattttattttcacattctttttgccatgtttatataataataaagaaaaaccctgttgatttgttggagccattgttatctgacagaaaataattgtttatattttttgcactacactgtctaaaattagcaagctctcttctaatggaactgtaagaaagatgaaatatttttgttttattataaatttatttcaccttaa

SEQ ID NO: 425 - protein, 162 aa, Homo sapiens
  mature Human IL-15 (IL-15sc) (UniProtKB Accession No.: P40933)
MRISKPHLRSISIQCYLCLLLNSHFLTEAGIHVFILGCFSAGLPKTEANWVNVISDLKKIEDLIQSMHIDATLYTESDVHPSCKVTAMKCFLLELQVISLESGDASIHDTVENLIILANNSLSSNGNVTESGCKECEELEEKNIKEFLQSFVHIVQMFINTS

SEQ ID NO: 426 - protein, 243 aa, Artificial Sequence
  Human IL-15Ralpha-IL-15sc fusion protein
MAPRRARGCRTLGLPALLLLLLLRPPATRGITCPPPMSVEHADIWVKSYSLYSRERYICNSGFKRKAGTSSLTECVLNKATNVAHWTTPSLKCIRDPALVHQRPAPPSGGGGSGGGGSGGGGSGGGGSANWVNVISDLKKIEDLIQSMHIDATLYTESDVHPSCKVTAMKCFLLELQVISLESGDASIHDTVENLIILANNSLSSNGNVTESGCKECEELEEKNIKEFLQSFVHIVQMFINTS

SEQ ID NO: 427 - protein, 263 aa, Mus musculus
  Murine IL-15Ralpha (Interleukin-15 receptor subunit alpha; UniProtKB Accession No.: Q60819)
MASPQLRGYGVQAIPVLLLLLLLLLLPLRVTPGTTCPPPVSIEHADIRVKNYSVNSRERYVCNSGFKRKAGTSTLIECVINKNTNVAHWTTPSLKCIRDPSLAHYSPVPTVVTPKVTSQPESPSPSAKEPEAFSPKSDTAMTTETAIMPGSRLTPSQTTSAGTTGTGSHKSSRAPSLAATMTLEPTASTSLRITEISPHSSKMTKVAISTSVLLVGAGVVMAFLAWYIKSRQPSQPCRVEVETMETVPMTVRASSKEDEDTGA

SEQ ID NO: 428 - protein, 162 aa, Mus musculus
  Murine IL-15 (single chain (sc); UniProtKB Accession No.: P48346)
MKILKPYMRNTSISCYLCFLLNSHFLTEAGIHVFILGCVSVGLPKTEANWIDVRYDLEKIESLIQSIHIDTTLYTDSDFHPSCKVTAMNCFLLELQVILHEYSNMTLNETVRNVLYLANSTLSSNKNVAESGCKECEELEEKTFTEFLQSFIRIVQMFINTS

SEQ ID NO: 429 - protein, 266 aa, Artificial Sequence
  Murine (mu) IL-15Ralpha-IL-15sc fusion protein
MASPQLRGYGVQAIPVLLLLLLLLLLPLRVTPGTTCPPPVSIEHADIRVKNYSVNSRERYVCNSGFKRKAGTSTLIECVINKNTNVAHWTTPSLKCIRDPSLAHYSPVPTVVTPKVTSQPESPSPSAKEPEAGGGGSGGGGSGGGGSGGGGSNWIDVRYDLEKIESLIQSIHIDTTLYTDSDFHPSCKVTAMNCFLLELQVILHEYSNMTLNETVRNVLYLANSTLSSNKNVAESGCKECEELEEKTFTEFLQSFIRIVQMFINTS

SEQ ID NO: 430 - DNA, 40 bp, Artificial Sequence
  New spacer
acgtcttctctttttaaaggacctcgtgaaataaaagtgc

SEQ ID NO: 431 - DNA, 80 bp, Artificial Sequence
  Longer spacer
tccgagccaagtaaggaggtccctctctctctctccccccacgtcttctctttttaaaggacctcgtgaaataaaagtgc

SEQ ID NO: 432 - DNA, 547 bp, Artificial Sequence
  VCIP IRES
agaaaacaaacccaggcgatcacagcagcagccgccgcggcagcagcaccaacagcaggaggagcaggaggagccggaggaggaggaggaggaggaggcaaagttagagttggggctggcgctccggagttgctgggctcagcgcagctcccattcattaaggaaccagctgcggaggaaggtggccgagcgcccgcgctgcccactcgctcgctcgcgcactcagacgcgcgccacaacagcgcgccccaagctgcgcagctctgcaaaagtttctgctcgggatctggctctcttccccttggactttagaacgatttagggttgacagaggaaagcagaggcgcgcaggaggagcagaaaacaccaccttctgcagttggaggcaggcagccccggctgcactctagccgccgcgcccggagccggggccgacccgccactatccgcagcagcctcggccaggaggcgacccgggcgcctgggtgtgtggctgctgttgcgggacgtcttcgcggggcgggaggctcgcgccgcagccagcgcc
